(19) United States
(12) Patent Application Publication
(10) Pub. No.: US 2007/0184452 A1
(43) Pub. Date: Aug. 9, 2007

(54) Identification of a gene and mutation responsible for autosomal recessive congenital hydrocephalus

(75) Inventors: Michael L. Robinson, Pataskala, OH (US); Brian E. Davy, Columbus, OH (US)

Correspondence Address: MARSHALL, GERSTEIN & BORUN LLP, 233 S. WACKER DRIVE, SUITE 6300, SEARS TOWER, CHICAGO, IL, 60606, US

(73) Assignee: CHILDREN'S HOSPITAL INC, Columbus, OH (US)

(21) Appl. No.: 10/650,449

(22) Filed: Aug. 27, 2003

Related U.S. Application Data
(60) Provisional application No. 60/406,285, filed on Aug. 27, 2002.
(60) Provisional application No. 60/485,440, filed on Jul. 8, 2003.

(51) Int. Cl. C12Q 1/68; C07H 21/04; C12P 21/06; C07K 14/705

(52) U.S. Cl. 435/6; 435/69.1; 435/320.1; 435/325; 530/350; 536/23.5

(57) ABSTRACT

The invention relates to the polynucleotide sequence of the Hydrocephalus-associated gene (Hydin), the polypeptide it encodes and uses therefore. The invention also relates to the mutation in the Hydin gene that is responsible for the development of hydrocephalus. The invention provides for methods of diagnosing hydrocephalus and cilia dysfunction-related disorders.

### RELATED APPLICATIONS

[0001] The present application claims priority to U.S. Provisional Application No. 60/406,285 filed Aug. 27, 2002 and U.S. Provisional Application No. 60/485,440 filed Jul. 8, 2003. All of the above-identified applications are incorporated herein by reference in their entirety.

### FIELD OF INVENTION

[0002] The invention relates to the polynucleotide sequence of a Hydrocephalus-associated gene (Hydin), the polypeptide it encodes and uses therefore. The invention also relates to the mutation in the Hydin gene that is responsible for the development of hydrocephalus.

### BACKGROUND

[0003] Hydrocephalus is an abnormal accumulation of cerebrospinal fluid (CSF) within cavities, known as ventricles, in the brain. As the CSF accumulates within the brain, it causes the ventricles to enlarge and the pressure inside the head to increase. Hydrocephalus is a complex disorder which can result from a variety of different congenital malformations or acquired conditions. Congenital hydrocephalus occurs in approximately 1 in every 1000 births.

### Categories and Treatment of Hydrocephalus

[0004] As a consequence of normal development, all parts of the central nervous system surround a continuous lumen originating from the neural tube. This lumen is expanded within the brain to form the lateral, third and fourth ventricles. Clusters of capillaries, surrounded by ependymal cells, line the floor of the lateral ventricles and the roof of the third and fourth ventricles. This capillary network is known as the choroid plexus. It is within the choroids plexus that cerebrospinal fluid (CSF) is produced by a combination of filtration and active transport processes. The central nervous system is entirely surrounded by CSF. CSF serves to protect, nourish and remove waste products from the brain. CSF is continuously produced and circulated through the brain's ventricular system. CSF produced in the lateral ventricles flows into the third ventricle through the interventricular foramen, also known as the foranen of Monro. The CSF flows from the third ventricle into the fourth ventricle through the long, narrow cerebral aqueduct, also known as the aqueduct of Sylvius. While a small portion of the CSF flows from the fourth ventricle into the continuous apertures (foramina of Luschka) and the median appeture (foramen of Magendie) into the subarachnoid space surrounding the brain and spinal cord. CSF is normally reabsorbed into the bloodstream through durul sinuses surrounding the arachnoid villi. The human adult choroid plexus produces approximately 500 ml of CSF every day, which is enough to completely fill the entire fluid spaces of the central nervous system four times over. Therefore, production and reabsorption of CSF is a continuous process in the normal brain.

[0005] Hydrocephalus results when there is excess CSF in the ventricular system of the central nervous system. Hydrocephalus can be congenital or acquired. Congenital hydrocephalus results from errors in the development or function of the ventricular system that are present at birth. Congenital hydrocephalus is further subdivided into syndromal (being part of a constellation of typical malformations such as Dandy-Walker Syndrome) or non-syndromal (isolated hydrocephalus). Acquired hydrocephalus results from non-genetic causes, such as tumors or injuries that interfere with normal production or circulation of CSF after birth. Hydrocephalus can be caused by a blockage of CSF flow through the subarachnoid space. Non-communicating or obstructive hydrocephalus results from a blockage in the flow of CSF through the ventricles. The long narrow structure of the cerebral aqueduct between the third and fourth ventricles makes this structure a particularly common site of CSF blockage. The hydrocephalus resulting from the overproduction or under-absorption of CSF is known as communicating hydrocephalus, because there is no blockage in the interventricular flow of CSF.

[0006] As hydrocephalus progresses, the ventricles tend to enlarge, and the intracranial pressure increases. In infants and young children, the expansion of the ventricles and the increase in the intracranial pressure results in enlargement of the head. In older children and adults, the closed cranial sutures prevent enlargement of the head, and ventricular dilation is accompanied by compression and thinning of the brain tissue. (Heimer, The Human Brain and Spinal Cord: Functional Neuroanatomy and Dissection Guide. 1983, New York; Springer-Verlag). While there are individual variations or normal ventricular volume, untreated progressive hydrocephalus invariably results in brain damage and eventual death. (Schurr and Polkey Hydrocephalus: Oxford Medical Publications. 21993, Oxford University Press: New York, N.Y.) Postnatal progressive hydrocephalus is most commonly treated by the surgical insertion of a shunt into the ventricular system. (James, Am Fam. Physician, 45: 773-42, 1992) These shunts commonly drain excess CSF into the peritoneal cavity (shunt). While shunting procedures have dramatically improved the prognosis of progressive hydrocephalus, CSF shunts require life-long maintenance and are prone to potentially lethal complications. (Casey, Pediatr. Neurosurg., 27: 63-70, 1997; Epstein, Clin. Neurosurg. 32: 608-631, 1985) Several attempts have been made to treat progressive congenital hydrocephalus detected in utero with fetal surgery using ventriculoamniotic shunts. Despite occasional success with this procedure (Goldstein et al., Fetal Diag. Ther., 5: 84-91, 1990), the long term prognosis of fetuses diagnosed with progressive congenital hydrocephalus remains poor. Many of the fetuses that survive to birth die during the first year of life, or suffer from severe mental and physical handicaps (Pretorius et al., AJR Am. J. Roentgenol. 144: 827-31, 1985)

### Genetics of Human Hydrocephalus

[0007] It is currently thought that a significant portion of human congenital hydrocephalus is genetic in origin, although the molecular genetics of human hydrocephalus remains poorly understood.

[0008] L1CAM is a neuronal cell adhesion molecule, belonging to the immunoglobulin superfamily, mainly expressed on neurons and schwann cells. (Fransen et al., Hum. Mol. Genet. 6: 1625-32, 1997) The phenotypes associated with L1CAM mutations are variable. L1CAM is known to be responsible for a wide spectrum of neurological abnormalities, many of which were thought to be distinct clinical entities. The pathological cause of L1CAM associated hydrocephalus is stenosis of the cerebral aqueduct causing obstructive, non-communicating hydrocephalus. Recently, male mice deficient in L1CAM expression developed many of the phenotypes associated with human mutations in L1CAM including spastic paraplegia and hydrocephalus. (Dahme et al., Nature Genetics, 17: 346-9, 1997) The hydrocephalus phenotype in these mice was dependent on the strain background, indicating that modifier genes are capable of influencing the L1CAM mutant phenotype. This explains much of the phenotypic variability often seen in human families among relatives with the same L1CAM mutations. (Schrander-Stumpel et al., Am. J. Med Genet., 57: 107-16, 1995; Fransen et al., Am. J. Med Genet, 64: 73-7, 1996) While mutations in the L1CAM gene are responsible for many, if not most, cases of human X-linked hydrocephalus, there is abundant evidence that autosomal recessive forms of human hydrocephalus exist. X-linked hydrocephalus overwhelmingly affects males and is thought to occur with a frequency of 1 in 30,000 male births. (Donnai et al., Eur. J. Pediatr. Surg., 3(suppl. 1): 5-7, 1993)

[0009] Autosomal recessive hydrocephalus would be expected to affect equal number of males and females. Several cases of multiple female or mixed sex siblings having hydrocephalus have been reported where autosomal recessive hydrocephalus was suspected. Some of these involve obstructive hydrocephalus associated with the cerebral aqueduct (Castro-Gago et al., Childs Nerv. Syst. 12: 188-91, 1996), the third ventricle (Chow et al., Am. J. Med Genet, 35: 310-3, 1990), the foramen of Monro (Chudley et al., Am. J. Med Genet., 68: 350-6, 1997) or the foramina of the fourth ventricle (Teebi et al., Am. J. Med Genet, 31: 467-70, 1988). In other cases, no obstructions were obvious and the hydrocephalus appeared to be communicating. (Game et al., Am. J. Med Genet, 33: 276-9, 1989) Particularly interesting is a group of Palestinian Arab families where autosomal recessive hydrocephalus appears to be relatively common. (Zlotagoto et al., Am. J. Med Genet, 49:202-4, 1994; Zlotogota et al., Am. J. Med Genet, 71: 33-5, 1997) Despite several reports of human hydrocephalus following an autosomal recessive mode of inheritance, the disease genes or chromosomal locations associated with these cases are entirely unknown.

### Mouse Models of Congenital Hydrocephalus

[0010] Mice have proven to be exceptional models for many human genetic diseases. In addition, to being easily maintained and propagated, the genetic information available for mice is unparalleled by any non-human vertebrate. Furthermore, the conservation of gene order in genomic segments identified between mouse and human chromosomes makes it possible to reasonably predict the human chromosomal location of any given gene based on its position in the mouse genome.

[0011] Several distinct autosomal recessive mutations leading to hydrocephalus have been reported in mice (Bronson and Lane, Brain Res. Dev. Brain Res., 54: 131-4, 1990; Clark, Proc. Natl. Acad. USA, 18: 654-656, 1932; Dickie, Mouse News Lett., 39: 27, 1968; Falconer and Sierts-Roth, Z. Indukt. Abstamm Verebungsl, 84: 71-73, 1951; Gruneberg, J. Genet., 45: 1-21, 1943, Gruneberg, J. Genet, 45: 22-28, 1943; Hollander, Iowa State J. Res. 51:13-23 1976; Punt et al., J. Neurol. Neurosurg. Psychiatry, 45: 280, 1982; Zimmermann, Z. Indukt. Abstamm Verebungsl 64: 176-180, 1933). Recently the transcription factors Foxc1 (Mf1) and Lmx1a were identified as responsible for the hydrocephalus mutations congenital hydrocephalus (ch) (Kume et al., Cell, 93: 985-96, 1998), and dreher (dr) (Millonig et al, Nature 403: 764-9, 2000), respectively. The genes responsible for the mutations hydrocephalus 1-3 (hy1, hy2 and hy3), hydrocephalus with hop gait (hyh), obstructive hydrocephalus (oh) and hop-sterile (hop) remain unidentified. In addition to these spontaneous mouse mutations, hydrocephalus is at least part of the phenotype in several engineered mice created by both insertional mutations (McNeish et al., J. Exp. Zool., 253: 151-62, 1990) and targeted mutations (Dahme et al., Nat. Genetics 17: 346-9, 1997; das Neves et al., Proc. Natl. Acad. Sci. USA, 96: 11946-51, 1999; Fransen et al. Hum. Mol. Genet., 7: 999-1009, 1998; Homanics et al. Proc. Natl. Acad. Sci. USA 90: 2389-93, 1993; Huang et al. J. Clin. Invest. 96: 2152-61, 1995; Ibanez-Tallon et al., Hum. Mol. Genet. 11:715-21, 2002; Lindeman et al., Genes Dev. 12: 1092-8, 1998).

[0012] There are several mouse models for genetic hydrocephalus where the approximate chromosomal position of the mutation has been mapped. In some of these mutants, hydrocephalus represents a small portion of a complex phenotype, for example legless. (McNeish et al., J. Exp. Zool. 253: 151-62, 1990) In other cases, hydrocephalus is the primary phenotype. Mouse hydrocephalus mutations association with specific chromosomal location are shown below in Table 1. In addition to these listed mutants, there are additional autosomal recessive mouse hydrocephalus mutations that have not been mapped, including obstructive hydrocephalus and SUM/NP. Of these mutations, only congenital hydrocephalus (ch) and dreher (dr) have has been cloned.

TABLE 1
Mouse Hydrocephalus Mutations

| Mutation | Chromosome | Inheritance | Reference |
|---|---|---|---|
| Congenital | 13 | Autosomal | Gruneberg, J. Genet., |
| hydrocephalus | | recessive | 45: 22-28, 1943 |
| dreher | 1 | Autosomal | Falconer et al., Z. Indukkt |
| | | recessive | Abstamm |
| | | | Veresbungs, 84: 71-73, |
| | | | 1951 |
| hop-sterile | 6 | Autosomal | Hollander, Iowa State |
| | | recessive | J. Res. 51: 13-23, |
| | | | 1976 |
| hydrocephalus | 8 | Autosomal | Gruneberg J. Genet., |
| 3 | | recessive | 45: 22-28, 1943 |
| hydrocephaly | 7 | Autosomal | Bronson et al., Brain |
| with hop gait | | recessive | Res. Dev. Brain Res. |
| | | | 54: 131-6. 1990 |
| legless | 12 | Autosomal | McNeish et al., J. |
| | | recessive | Exp. Zool. 253: 151-62, |
| | | | 1990 |

[0013] Targeted disruption of the winged helix/forkhead transcription factor gene Mf1 (Foxc1) resulted in a phenotype indistinguishable from ch/ch homozygotes. Subsequently, the ch mutation was found to be a stop codon in the Mf1 forkhead domain. (Kume et al., 1998, supra.) Human patients, heterozygous for mutations in FKHL7/freac3 (a presumed homolog of Mf1/Foxc1) suffer from abnormalities in the anterior chamber of the eye including, congenital glaucoma, Axenfeld-Rieger anomaly, and iridogoniodsgenesis. Heterozygous ch mice exhibit similar ocular abnormalities. No human patients with homozygous mutations in FKHL/freac3 have been confirmed in the literature. Hydrocephalus has been described in patients with deletions encompassing the region on chromosome six where FKHL/freac3 is mapped (Davies et al., Hum. Genet., 98: 454-9, 1996), and one family with multiple siblings exhibiting Axenfeld-Rieger anomaly and hydrocephalus has been described. (Moog et al., Am. J. Med. Genet., 33: 276-279, 1989)

[0014] Two new hydrocephalus genes were inadvertently discovered by gene targeting. One of these is the murine nuclear factor-1 (Nfia) gene on mouse chromosome 4. (das Neves et al., 1999, supra.) The other involves the disruption of the transcription factor E2F5 leading to the overproduction of CSF in homozygous mutant mice. (Lindeman et al., I genes Dev. 12: 1092-8, 1998) The E2F5 gene has been mapped to chromosome 3 in mice, and has been mapped to human chromosome 8. Additionally, transgenic mice overexpressing TGFβ-1 in the central nervous system develop hydrocephalus. (Galbreath et al., J. Neuropathol. Exp. Neurol., 54: 339-49, 1995, Wyss-Coroy et al., Am. J. Pathol., 147: 53-67, 1995) The intrathecal injection of recombinant TGFβ-1 had previously been shown to induce communicating hydrocephalus in mice (Tada et al., J. Neuroimmunol., 50: 153-8, 1994) and elevated levels of TGFβ-1 have been reported in human communicating hydrocephalus following subacrachnoid hemorrhydine. (Kitazawa et al., Stroke, 25: 1400-4, 1994). The development of hydrocephalus in these cases may be related to an increased production of extracellular matrix within the subarachnoid space leading to decreased CSF reaborsption. (Wyss-Coroy et al., 1995, supra.) Mice are used to model human genetic disease because, as illustrated by the ch heterozygotes, a mutation in a given gene will often produce a similar phenotype in mouse and man. (Melton, Bioassays, 16: 633-8, 1994) Therefore, it is reasonable to believe that most, if not all, of the mouse hydrocephalus mutations will have a clinical human counterpart.

### hy3 Mutation

[0015] The hy3 mutation was first identified by Hans Gruneberg, and described as an autosomal recessive inherited phenotype including nasal discharge, runting and hydrocephalus with variable postnatal onset and survival time (Gruneberg 1943b, supra). R. J. Berry further characterized the hy3 mutant phenotype after several generations of inbreeding and reported a consistent runted phenotype in presumed homozygotes with accompanying hydrocephalus, but no nasal discharge (Berry, J. Path. Bact. 81: 157-161, 1961) Berry also reported that the incidence of hydrocephalus among offspring of heterozygous hy3 parents as 16.6%, significantly less than the expected 25% for an autosomal recessive trait with complete penetrance. (Berry, 1961, supra.) The inbred mutant stock was obtained and maintained as heterozygotes (stock HyIII/Le) by the Jackson Laboratory until 1995 when the original inbred stock stopped breeding, and the mutation was then recovered and maintained on a mixed C57BL/6 and CBA/Ca hybrid background. No molecular markers have been reported to identify heterozygous versus homozygous mutant mice, and therefore, hy3 heterozygotes are traditionally identified by test mating. We observed a frequency of hydrocephalus among offspring of heterozygous hy3 parents of 22.3%. This is higher than the 16.6% observed by Berry and much closer to the expected 25% for a fully penetrant autosomal recessive phenotype.

[0016] The hy3 mutation was originally mapped by three point test cross by Margaret C. Green and communicated to Roy Robinson of the Jackson Laboratory by a personal letter in 1970 (Jeff Ceci, personal communication). In this letter, Dr. Green placed hy3 approximately 17 cM distal to Os (oligosyndactylism) and 11 cM proximal to e (recessive yellow) on mouse chromosome 8. This information was used to place the location of hy3 at 57 cM on the consensus chromosome 8 linkage map (Blake et al. Nucl. Acids Res. 30: 113-5, 2002). Using molecular markers it was determined that the transgene insertion site does not recombine with D8Mit151 in 188 backcross animals in the combined BSB and BSS interspecific backcross mapping panel from the Jackson Laboratory. (Fryns et al., Ann Genet., 24: 124-5, 1981; Naritomi et al., Clin. Genet., 33: 372-5, 1988; Rivera et al., Clin. Genet., 20: 465-99, 1985).

[0017] Current methods for pre-natal diagnosing of autosomal recessive congenital hydrocephalus are not optimally reliable, provide false negatives and may not be adequately informative at early points during pregnancy.

### SUMMARY OF INVENTION

[0018] A new transgene-induced insertional mutation, OVE459, resulting in autosomal recessive hydrocephalus is described herein. This mutation does not complement the spontaneous mutation hy3 and represents a new allele of this gene. Furthermore we report genetic and physical mapping of the transgene insertion locus, and cloning of the Hydrocephalus-associated gene (Hydin) that contains a frame shift mutation in hy3/hy3 mice.

[0019] The Hydin gene and protein described herein are identical to the Hag gene and protein disclosed in U.S. Provisional Application Nos. 60/406,285 and 60/485,440.

[0020] The present invention provides for the identification and characterization of the novel murine Hydin gene and corresponding human homolog sequences. The murine Hydin cDNA sequence is set out as SEQ ID NO: 1 and is 15769 bases and encompasses 87 exons. The murine Hydin gene is located on chromosome 8 and is an allele of the hy3 gene that was previously known in the art. In homozygous hy3/hy3 mice, which spontaneously generate congenital hydrocephalus, there is a frame shift mutation within exon 15 that results in a stop codon. This mutation is believed to be responsible for autosomal recessive congenital hydrocephalus. The predicted human Hydin cDNA sequence is set out as SEQ ID NO: 14. The human Hydin cDNA sequence is 15.7 kB (15783 bases). The predicted human Hydin polypeptide sequence is set out as SEq ID NO: 15.

[0021] The present invention provides for the polynucleotide sequence of the murine Hydin gene set out as SEQ ID NO: 1, the genomic sequence of the murine Hydin gene set out as SEQ ID NO: 3 or SEQ ID NO: 16, the predicted human Hydin gene set out as SEQ ID NO: 14. The present invention also provides for polynucleotides which encode the full length polypeptide sequence of SEQ ID NO: 2, SEQ ID NO: 15 or fragments thereof. The invention provides for polynucleotides that hybridize under stringent conditions to (a) the complement of the nucleotides sequence of SEQ ID NOS: 1, 3, 14 or 16; (b) a polynucleotide encoding the polypeptide of SEQ ID NOS: 2 or 15; (c) a polynucleotide which is an allelic variant of any polynucleotides recited above; (d) a polynucleotide which encodes a species homolog of any of the proteins recited above; or (e) a polynucleotide that encodes a polypeptide comprising a specific domain or truncation of the polypeptides of SEQ ID NOS: 2 or 15.

[0022] The present invention also provides genes corresponding to the cDNA sequences disclosed herein. The corresponding genes can be isolated in accordance with known methods using the sequence information disclosed herein. Such methods include the preparation of probes or primers from the disclosed sequence information for identification and/or amplification of genes in appropriate genomic libraries or other sources of genomic materials. Further 5′ and 3′ sequence can be obtained using methods known in the art. For example, full length cDNA or genomic DNA that corresponds to the polynucleotide of SEQ ID NOS: 1, 3, 14 or 16 can be obtained by screening appropriate cDNA or genomic DNA libraries under suitable hybridization conditions using the polynucleotides of SEQ ID NOS: 1, 3, 14 or 16 or a portion thereof as a probe. Alternatively, the polynucleotide of SEQ ID NOS: 1, 3, 14 or 16 may be used as the basis for suitable primer(s) that allow identification and/or amplification of genes in appropriate genomic DNA or cDNA libraries.

[0023] The nucleic acid sequences of the invention can be assembled from ESTs and sequences (including cDNA and genomic sequences) obtained from one or more public databases, such as dbEST, gbpri, and UniGene, and commercially-available private databases. The EST sequences can provide identifying sequence information, representative fragment or segment information, or novel segment information for the full-length gene.

[0024] The polynucleotides of the invention also provide polynucleotides including nucleotide sequences that are substantially equivalent to the polynucleotides recited above. Polynucleotides according to the invention can have, e.g., at least about 65%, at least about 70%, at least about 75%, at least about 80%, 81%, 82%, 83%, 84%, 85%, 86%, 87%, 88%, or 89%, more typically at least about 90%, 91%, 92%, 93%, or 94% and even more typically at least about 95%, 96%, 97%, 98% or 99% sequence identity to a polynucleotide recited above.

[0025] Included within the scope of the nucleic acid sequences of the invention are nucleic acid sequence fragments that hybridize under stringent conditions to the nucleotide sequences of SEQ ID NOS: 1, 3, 14 or 16 or complements thereof, which fragment is greater than about 5 nucleotides, preferably 7 nucleotides, more preferably greater than 9 nucleotides and most preferably greater than 17 nucleotides. Fragments of, e.g. 15, 17, or 20 nucleotides or more that are selective for (i.e., specifically hybridize to any one of the polynucleotides of the invention) are contemplated. Probes capable of specifically hybridizing to a polynucleotide can differentiate polynucleotide sequences of the invention from other polynucleotide sequences in the same family of genes or can differentiate murine genes from genes of other species, and are preferably based on unique nucleotide sequences.

[0026] The term “stringent” is used to refer to conditions that are commonly understood in the art as stringent. Stringent conditions can include highly stringent conditions (i.e., hybridization to filter-bound DNA under in 0.5 M NaHPO₄, 7% sodium dodecyl sulfate (SDS), 1 mM EDTA at 65° C., and washing in 0.1×SSC/0.1% SDS at 68° C.), and moderately stringent conditions (i.e., washing in 0.2×SSC/0.1% SDS at 42° C.). In instances wherein hybridization of deoxyoligonucleotides is concerned, additional exemplary stringent hybridization conditions include washing in 6×SSC/0.05% sodium pyrophosphate at 37° C. (for 14-base oligos), 48° C. (for 17-base oligos), 55° C. (for 20-base oligos), and 60° C. (for 23-base oligos).

[0027] The sequences falling within the scope of the present invention are not limited to these specific sequences, but also include allelic and species variations thereof. Allelic and species variations can be routinely determined by comparing the sequence provided in SEQ ID NOS: 1, 3, 14 or 16, a representative fragment thereof, or a nucleotide sequence at least 90% identical, preferably 95% identical, to SEQ ID NOS: 1, 3, 14 or 16 with a sequence from another isolate of the same species. Furthermore, to accommodate codon variability, the invention includes nucleic acid molecules coding for the same amino acid sequences as do the specific open reading frames (ORF) disclosed herein. In other words, in the coding region of an ORF, substitution of one codon for another codon that encodes the same amino acid is expressly contemplated.

[0028] Species homologs (or orthologs), in particular human homologs, of the disclosed polynucleotides and proteins are also provided by the present invention. Species homologs may be isolated and identified by making suitable probes or primers from the sequences provided herein and screening a suitable nucleic acid source from the desired species. The following human BAC clones have been identified within the human chromosome 16 contig represented by the Accession No. NT 010635 to share consensus sequences with the mouse Hydin gene and are contemplated to be portions of the human Hydin homolog: BAC CTA-427H10 (Accession No. AC130459), BAC RP11-240C17 (Accession No. AC109135), BAC RP11-424M24 (Accession No. AC027281), and BAC CIT987SK-A-911E12 (Accession NO. AC003964).

[0029] The isolated polypeptides of the invention include, but are not limited to, a polypeptide comprising: the amino acid sequences set forth as any one of SEQ ID NOS: 2 or 15 or an amino acid sequence encoded by the nucleotide sequences SEQ ID NOS: 1, 3, 14 or 16 or the corresponding full length or mature protein. Polypeptides of the invention also include polypeptides preferably with biological or immunological activity that are encoded by: (a) a polynucleotide having the nucleotide sequences set forth in SEQ ID NOS: 1, 3, 14 or 16 or (b) polynucleotides encoding the amino acid sequence set forth as SEQ ID NOS: 2 or 15 or (c) polynucleotides that hybridize to the complement of the polynucleotides of either (a) or (b) under stringent hybridization conditions. The invention also provides biologically active or immunologically active variants of the amino acid sequences set forth as SEQ ID NOS: 2 or 15 or the corresponding full length or mature protein; and “substantial equivalents” thereof (e.g., with at least about 65%, at least about 70%, at least about 75%, at least about 80%, at least about 85%, 86%, 87%, 88%, 89%, at least about 90%, 91%, 92%, 93%, 94%, typically at least about 95%, 96%, 97%, more typically at least about 98%, or most typically at least about 99% amino acid identity) that retain biological activity. Polypeptides encoded by allelic variants may have a similar, increased, or decreased activity compared to polypeptides comprising SEQ ID NOS: 2 or 15. The present invention also provides for compositions comprising the polypeptides described above and a carrier.

[0030] Fragments of the proteins of the present invention which are capable of exhibiting biological activity are also encompassed by the present invention. Fragments of the protein may be in linear form or they may be cyclized using known methods, for example, as described in. Saragovi, et al., Bio/Technology 10: 773-778, 1992 and in McDowell, et al., J. Amer. Chem. Soc. 114: 9245-9253, 1992, both of which are incorporated herein by reference. Such fragments may be fused to carrier molecules such as immunoglobulins for many purposes, including increasing the valency of protein binding sites.

[0031] Protein compositions of the present invention may further comprise an acceptable carrier, such as a hydrophilic, e.g., pharmaceutically acceptable, carrier.

[0032] The present invention further provides isolated polypeptides encoded by the nucleic acid fragments of the present invention or by degenerate variants of the nucleic acid fragments of the present invention. By “degenerate variant” is intended nucleotide fragments which differ from a nucleic acid fragment of the present invention (e.g., an ORF) by nucleotide sequence but, due to the degeneracy of the genetic code, encode an identical polypeptide sequence. Preferred nucleic acid fragments of the present invention are the ORFs that encode proteins.

### Frame Shift Mutation in the Hydin in hy3 Mice

[0033] The invention provides for a frame shift mutation in exon 15 of the Hydin gene which results in a premature stop codon and truncated transcription of the gene. This frame shift mutation spontaneously occurs in homozygous hy3 mutant mice and therefore the frame shift mutation is contemplated to be responsible for the initiation of hydrocephalus in the hy3 mutant mice.

[0034] The polynucleotides of the invention are useful for detection of the frame shift mutation or any other mutation that plays a role in initiating or progressing hydrocephalus. The Hydin gene and fragments thereof, in particular fragments comprising exons 16 through 87 of the Hydin gene, are useful for screening for heterozygous carriers of the frame shift mutation or any other hydrocephalus related mutation in the Hydin gene.

[0035] Current methods for pre-natal diagnosis of autosomal recessive congenital hydrocephalus include ultrasound techniques, DNA linkage analysis in a chronic villous biopsy and cytogenetic studies. Even though diagnostic methods are available, there is no definitive proof of autosomal recessive hydrocephalus; and the existing tests are not optimally reliable and provide false negative. In addition, the ultrasound methods may not detect congenital hydrocephalus until the second trimester of pregnancy and that point it may too late to seek fetal therapy or termination of the pregnancy. Therefore, the identification of additional markers for autosomal recessive congenital hydrocephalus will make screening methods more reliable. In addition, markers which identify heterozygous carriers of the autosomal recessive gene responsible for congenital hydrocephalus identify high-risk parents.

[0036] The present invention further provides methods to identify the presence, mutation or expression of the Hydin gene, or homolog thereof, in a test sample, using a nucleic acid probe or antibodies of the present invention, optionally conjugated or otherwise associated with a suitable label.

[0037] In one embodiment, the invention provides for methods of detecting the Hydin gene comprising the steps of contacting a biological sample with a compound that binds to a Hydin polynucleotide and detecting binding between the compound and the polynucleotide, wherein binding indicates the presence of the Hydin gene in the sample. In another embodiment, the invention provides for methods of detecting the Hydin polypeptide of the invention comprising the steps of contacting a biological sample with a compound that binds to a Hydin polypeptide and detecting binding between the compound and the polypeptide, wherein binding indicates the presence of the Hydin gene in the sample. The invention also provides methods of detecting a mutation in the human Hydin gene comprising steps of contacting a biological sample with a compound that binds to a Hydin polynucleotide and detecting binding between the compound and the polynucleotide, wherein binding indicates the presence of a mutation in the human Hydin gene in the sample. The mutations detected include a mutation at a position that corresponds to the OVE459 mutation in the murine Hydin gene.

[0038] In general, methods for detecting the Hydin gene or mutations thereof can comprise contacting a sample with a compound that binds to and forms a complex with the polynucleotide for a period sufficient to form the complex, and detecting the complex, so that if a complex is detected, a polynucleotide of the invention is detected in the sample. Such methods can also comprise contacting a sample under stringent hybridization conditions with nucleic acid primers that anneal to a polynucleotide of the invention under such conditions, and amplifying annealed polynucleotides, so that if a polynucleotide is amplified, a polynucleotide of the invention is detected in the sample.

[0039] In general, methods for detecting a polypeptide of the invention can comprise contacting a sample with a compound that binds to and forms a complex with the polypeptide for a period sufficient to form the complex, and detecting the complex, so that if a complex is detected, a polypeptide of the invention is detected in the sample.

[0040] In detail, such methods comprise incubating a test sample with one or more of the antibodies or one or more of the nucleic acid probes of the present invention and assaying for binding of the nucleic acid probes or antibodies to components within the test sample.

[0041] The invention provides for methods of diagnosing hydrocephalus or a ciliary dysfunction-related disorder comprising detecting a mutation in the Hydin gene by contacting a biological sample with a compound that binds to the Hydin polynucleotide having the nucleic acid sequence of SEQ ID NO: 1, SEQ ID NO: 3, SEQ ID NO: 14 or SEQ ID NO: 16 and detecting binding between the compound and the polynucleotide, wherein detection of the mutation is indicative of hydrocephalus or a ciliary dysfunction-related disorder.

[0042] Conditions for incubating a nucleic acid probe or antibody with a test sample vary. Incubation conditions depend on the format employed in the assay, the detection methods employed, and the type and nature of the nucleic acid probe or antibody used in the assay. One skilled in the art will recognize that any one of the commonly available hybridization, amplification or immunological assay formats can readily be adapted to employ the nucleic acid probes or antibodies of the present invention. Examples of such assays can be found in Chard, T., An Introduction to Radioimmunoassay and Related Techniques, Elsevier Science Publishers, Amsterdam, The Netherlands (1986); Bullock, G. R. et al., Techniques in Immunocytochemistry, Academic Press, Orlando, Fla. Vol. 1 (1982), Vol. 2 (1983), Vol. 3 (1985); Tijssen, P., Practice and Theory of Immunoassays: Laboratory Techniques in Biochemistry and Molecular Biology, Elsevier Science Publishers, Amsterdam, The Netherlands (1985). The test samples of the present invention include cells, protein or membrane extracts of cells, or biological fluids such as cerebral spinal fluid, amniotic fluid, sputum, blood, serum, plasma, or urine. The test sample used in the above-described method will vary based on the assay format, nature of the detection method and the tissues, cells or extracts used as the sample to be assayed. Methods for preparing protein extracts or membrane extracts of cells are well known in the art and can be readily be adapted in order to obtain a sample which is compatible with the system utilized.

[0043] The invention also provides for polypeptide-specific nucleic acid hybridization probes capable of hybridizing with naturally occurring nucleotide sequences. The hybridization probes of the subject invention may be derived from the nucleotide sequence SEQ ID NOS: 1, 3, 14 or 16. Because the Hydin gene is only expressed in a limited number of tissues, a hybridization probe derived from of the nucleotide sequence of SEQ ID NOS: 1, 3, 14 or 16 can be used as an indicator of the presence of RNA of cell type of such a tissue in a sample. Any suitable hybridization technique can be employed, such as, for example, in situ hybridization. PCR as described in U.S. Pat. Nos. 4,683,195 and 4,965,188 provides additional uses for oligonucleotides based upon the nucleotide sequences. Such probes used in PCR may be of recombinant origin, may be chemically synthesized, or a mixture of both. The probe will comprise a discrete nucleotide sequence for the detection of identical sequences or a degenerate pool of possible sequences for identification of closely related genomic sequences. Other means for producing specific hybridization probes for nucleic acids include the cloning of nucleic acid sequences into vectors for the production of mRNA probes. Such vectors are known in the art and are commercially available and may be used to synthesize RNA probes in vitro by means of the addition of the appropriate RNA polymerase as T3, T7 or SP6 RNA polymerase and the appropriate radioactively labeled nucleotides. The nucleotide sequences may be used to construct hybridization probes for mapping their respective genomic sequences. The nucleotide sequence provided herein may be mapped to a chromosome or specific regions of a chromosome using well-known genetic and/or chromosomal mapping techniques. These techniques include in situ hybridization, linkage analysis against known chromosomal markers, hybridization screening with libraries or flow-sorted chromosomal preparations specific to known chromosomes, and the like. The technique of fluorescent in situ hybridization of chromosome spreads has been described, among other places, in Verma et al (1988) Human Chromosomes: A Manual of Basic Techniques, Pergamon Press, New York N.Y.

[0044] Fluorescent in situ hybridization of chromosomal preparations and other physical chromosome mapping techniques may be correlated with additional genetic map data. Correlation between the location of a nucleic acid on a physical chromosomal map and a specific disease (or predisposition to a specific disease) may help delimit the region of DNA associated with that genetic disease. The nucleotide sequences of the subject invention may be used to detect differences in gene sequences between normal, carrier or affected individuals.

### Connection with Cilia Function

[0045] Experimental and clinical studies have linked cilia dysfunction and/or absence of cilia expression to hydrocephalus. Homozygous mutant mice, which have a disruption in the winged helix factor hepatocyte nuclear factor gene, have a complete absence of cilia and exhibit hydrocephalus at about 1 week of age. (Chen et al., J. Clin. Invest. 102(6): 1077-1082, 1998). Mice with mutations in the Polaris gene (Tg737) have decreased cilia in the lining of the ventricular lumen and also exhibited hydrocephalus. (Taulman et al., Mol. Cell. Biol. 12: 589-599, 2001). This relationship is substantiated by the report that a golden retriever diagnosed with primary ciliary dyskinesia, was additionally diagnosed with hydrocephalus after necropsy. (Reichler et al., J. Small Anim. Pract., 42: 345-8, 2001). In addition, members of a large Joranian family with recurrent pulmonary infections were diagnosed with both primary ciliary dyskinesia and hydrocephalus. (Mayo Clin. Proc. 76(12): 1219-24, 2001).

[0046] Scanning electron microscopic studies have determined the hy3 mice with severe hydrocephalus at day 18 and 35 had a progressive decrease in cilia populations as the roof of the ventricles were approached. The cilia populations ranged from normal at the basal regions to complete absence at the roof of the ventricle. In addition, the cilia that were presence within the ventricle of the 35 day hy3 mouse were short and had an abnormal appearance. (Bannister and Mundy, Acta Neurochir, 46: 159-168, 1979).

[0047] The expression pattern of the Hydin transcript in the fetal and adult mouse suggests that Hydin expression and cilia function may be related. As describe below in Example 6, the Hydin transcript is highly expressed in the following ciliated tissues: chroroid plexus, ependymal cells, the respiratory tract and the testes. In addition the Hydin gene is known to be expressed in the following organisms which have motive cilia: (amphibians) Xenopus tropicalis, Xenopus laevis, (mammals) Mus musculus domesticus, Rattus norvegicus, Bos taurus, Sus scrofa, (fish) Danio rerio, Fagu rubripes, (sea squirts) Ciona intestinalis, Ciona savignyi and (single cell photosynthetic algae) Chlamydomonas reinhardtii. However, Hydin gene expression was undetectable in C. elegans which do not possess motile cilia. Therefore, mutations in the Hydin gene, such as the frame shift mutation described herein, are contemplated to play a role in ciliary dysfunction-related disorders. The Hydin polynucleotide sequence of SEQ ID NOS: 1, 3, 14 or 16 or fragments thereof may be effective diagnostic indicators of ciliary dysfunction-related disorders. The administration of the Hydin polypeptide may effectively treat or prevent ciliary dysfunction-related disorders. The congenital disorders may be treated in utero with gene therapy based on the Hydin gene or polypeptide. The ciliary dysfunction-related disorders in addition to hydrocephalus, contemplated by the present invention include, but are not limited to, Kartagener syndrome, primary ciliary dyskinesia, chronic respiratory diseases such as chronic sinusitis and chronic rhinitis, male infertility, deafness and kidney failure.

[0048] The invention provides for methods of diagnosing a ciliary dysfunction-related disorder comprising detecting a mutation in the Hydin gene by contacting a biological sample with a compound that binds to the polynucleotide having the nucleic acid sequence of SEQ ID NO: 14 and detecting binding between the compound and the polynucleotide, wherein detection of the mutation is indicative of a ciliary dysfunction disorder.

### Gene Therapy

[0049] Mutations in the Hydin gene may result in loss of normal function of the encoded protein. The invention thus provides gene therapy to restore normal activity of the polypeptides of the invention; or to treat disease states involving polypeptides of the invention. Delivery of a functional gene encoding polypeptides of the invention to appropriate cells is effected ex vivo, in situ, or in vivo by use of vectors, and more particularly viral vectors (e.g., adenovirus, adeno-associated virus, or a retrovirus), or ex vivo by use of physical DNA transfer methods (e.g., liposomes or chemical treatments). See, for example, Anderson, Nature 392(supp.): 25-20 (1998). For additional reviews of gene therapy technology see Friedmann, Science, 244. 1275-1281 (1989); Verma, Scientific American: 68-84 (1990); and Miller, Nature, 357: 455-460 (1992). Introduction of any one of the nucleotides of the present invention or a gene encoding the polypeptides of the present invention can also be accomplished with extrachromosomal substrates (transient expression) or artificial chromosomes (stable expression).

[0050] The present invention still further provides cells genetically engineered in vivo to express the polynucleotides of the invention, wherein such polynucleotides are in operative association with a regulatory sequence heterologous to the host cell which drives expression of the polynucleotides in the cell. These methods can be used to increase or decrease the expression of the polynucleotides of the present invention.

[0051] Knowledge of DNA sequences provided by the invention allows for modification of cells to permit, increase, or decrease, expression of endogenous polypeptide. Cells can be modified (e.g. by homologous recombination) to provide increased polypeptide expression by replacing, in whole or in part, the naturally occurring promoter with all or part of a heterologous promoter so that the cells express the protein at higher levels. The heterologous promoter is inserted in such a manner that it is operatively linked to the desired protein encoding sequences. See, for example, PCT International Publication No. WO 94/12650, PCT International Publication No. WO 92/20808, and PCT International Publication No. WO 91/09955. It is also contemplated that, in addition to heterologous promoter DNA, amplifiable marker DNA (e.g., ada, dhfr, and the multifunctional CAD gene which encodes carbamyl phosphate synthase, aspartate transcarbamylase, and dihydroorotase) and/or intron DNA may be inserted along with the heterologous promoter DNA. If linked to the desired protein coding sequence, amplification of the marker DNA by standard selection methods results in co-amplification of the desired protein coding sequences in the cells.

[0052] In another embodiment of the present invention, cells and tissues may be engineered to express an endogenous gene comprising the polynucleotides of the invention under the control of inducible regulatory elements, in which case the regulatory sequences of the endogenous gene may be replaced by homologous recombination. As described herein, gene targeting can be used to replace a gene's existing regulatory region with a regulatory sequence isolated from a different gene or a novel regulatory sequence synthesized by genetic engineering methods. Such regulatory sequences may be comprised of promoters, enhancers, scaffold-attachment regions, negative regulatory elements, transcriptional initiation sites, regulatory protein binding sites or combinations of said sequences. Alternatively, sequences which affect the structure or stability of the RNA or protein produced may be replaced, removed, added, or otherwise modified by targeting. These sequences include polyadenylation signals, mRNA stability elements, splice sites, leader sequences for enhancing or modifying transport or secretion properties of the protein, or other sequences which alter or improve the function or stability of protein or RNA molecules.

[0053] The targeting event may be a simple insertion of the regulatory sequence, placing the gene under the control of the new regulatory sequence, e.g., inserting a new promoter or enhancer or both upstream of a gene. Alternatively, the targeting event may be a simple deletion of a regulatory element, such as the deletion of a tissue-specific negative regulatory element. Alternatively, the targeting event may replace an existing element; for example, a tissue-specific enhancer can be replaced by an enhancer that has broader or different cell-type specificity than the naturally occurring elements. Here, the naturally occurring sequences are deleted and new sequences are added. In all cases, the identification of the targeting event may be facilitated by the use of one or more selectable marker genes that are contiguous with the targeting DNA, allowing for the selection of cells in which the exogenous DNA has integrated into the cell genome. The identification of the targeting event may also be facilitated by the use of one or more marker genes exhibiting the property of negative selection, such that the negatively selectable marker is linked to the exogenous DNA, but configured such that the negatively selectable marker flanks the targeting sequence, and such that a correct homologous recombination event with sequences in the host cell genome does not result in the stable integration of the negatively selectable marker. Markers useful for this purpose include the Herpes Simplex Virus thymidine kinase (TK) gene or the bacterial xanthine-guanine phosphoribosyl-transferase (gpt) gene.

[0054] The gene targeting or gene activation techniques which can be used in accordance with this aspect of the invention are more particularly described in U.S. Pat. No. 5,272,071 to Chappel; U.S. Pat. No. 5,578,461 to Sherwin et al.; International Application No. PCT/US92/09627 (WO93/09222) by Selden et al.; and International Application No. PCT/US90/06436 (WO91/06667) by Skoultchi et al., each of which is incorporated by reference herein in its entirety.

### Compositions

[0055] Pharmaceutical compositions comprising the Hydin polypeptide of the invention are provided. The pharmaceutical compositions may comprise one or more additional ingredients such as pharmaceutically effective carriers. Dosage and frequency of the administration of the pharmaceutical compositions are determined by standard techniques and depend, for example, on the weight and age of the individual, the route of administration, and the severity of symptoms. Administration of the pharmaceutical compositions may be by routes standard in the art, for example, parenteral, intravenous, oral, buccal, nasal, pulmonary, rectal, or vaginal.

### Antibodies

[0056] The present invention provides for antibodies and antibody fragments that bind to the Hydin polypeptide. The antibodies may be polyclonal including monospecific polyclonal, monoclonal (mAbs), recombinant, chimeric, humanized such as CDR-grafted, human, single chain, and/or bispecific, as well as fragments, variants or derivatives thereof. Antibody fragments include those portions of the antibody which bind to an epitope on the Hydin polypeptide. Examples of such fragments include Fab and F(ab′) fragments generated by enzymatic cleavage of full-length antibodies. Other binding fragments include those generated by recombinant DNA techniques, such as the expression of recombinant plasmids containing nucleic acid sequences encoding antibody variable regions.

[0057] Polyclonal antibodies directed toward the Hydin polypeptide generally are produced in animals (e.g., rabbits or mice) by means of multiple subcutaneous or intraperitoneal injections of the Hydin polypeptide and an adjuvant. It may be useful to conjugate a Hydin polypeptide or fragment thereof to a carrier protein that is immunogenic in the species to be immunized, such as keyhole limpet heocyanin, serum, albumin, bovine thyroglobulin, or soybean trypsin inhibitor. Also, aggregating agents such as alum are used to enhance the immune response. After immunization, the animals are bled and the serum is assayed for Hydin antibody titer.

[0058] Monoclonal antibodies directed toward Hydin polypeptide are produced using any method which provides for the production of antibody molecules by continuous cell lines in culture. Examples of suitable methods for preparing monoclonal antibodies include the hybridoma methods of Kohler et al., Nature, 256:495-497 (1975) and the human B-cell hybridoma method, Kozbor, J. Immunol., 133:3001 (1984); Brodeur et al., Monoclonal Antibody Production Techniques and Applications, pp. 51-63 (Marcel Dekker, Inc., New York, 1987). Also provided by the invention are hybridoma cell lines which produce monoclonal antibodies reactive with Hydin polypeptides.

[0059] Antibodies which specifically bind to the Hydin polypeptide may be used to provide reagents for use in diagnostic assays for the detection of the Hydin polypeptide in various body fluids. In another embodiment, the Hydin polypeptide or fragments thereof may be used as antigens in immunoassays for the detection of Hydin polypeptide in various patient tissues and body fluids including, but not limited to: ambiotic fluid, blood, serum, ear fluid, spinal fluid, sputum, urine, lymphatic fluid and cerebrospinal fluid. The antigens of the present invention may be used in any immunoassay system known in the art including, but not limited to: radioimmunoassays, ELISA assays, sandwich assays, precipitin reactions, gel diffusion precipitin reactions, immunodiffusion assays, agglutination assays, fluorescent immunoassays, protein A immunoassays and immunoelectrophoresis assays.

[0060] For diagnostic applications, antibodies that specifically bind Hydin polypeptide may be labeled with a detectable moiety. The detectable moiety can be any one which is capable of producing, either directly or indirectly, a detectable signal. For example, the detectable moiety may be a radioisotope, such as ³H, ¹⁴C, ³²P, ³⁵S, or ¹²⁵I, a fluorescent or chemiluminescent compound, such as fluorescein isothiocyanate, rhodamine, or luciferin; or an enzyme, such as alkaline phosphatase, β-galactosidase, or horseradish peroxidase (Bayer et al., Meth. Enz., 184:138-163 (1990)).

### BRIEF DESCRIPTION OF DRAWINGS

[0061] FIG. 1 depicts the 1,552 bp microinjection construct used to create OVE459 transgenic mice. This construct consisted of the murine αA-crystallin promoter (αA) fused to the human BDNF coding sequence (hBDNF) linked to the 3′ UTR and poly-adenylation signal from the α subunit of the bovine follicle stimulating hormone gene (FSH pA). The coding sequence and 3′ UTR were cloned into the CPV2 vector as a 1,159 bp XbaI fragment, and this transgene-specific XbaI fragment was used as a probe for Southern and FISH analysis. Restriction enzyme site shown are SstII (S), NheI (Nh), BamHI (B), XbaI (X), EcoRI (E) and NotI (N).

[0062] FIG. 2 depicts FISH mapping of the OVE459 transgene insertion locus. (A) A portion of a single metaphase spread from a hydrocephalic OVE459 transgenic mouse is shown following G-banding, (B) the same metaphase region after hybridization to the transgene-specific Xba I fragment probe. Hybridization was confined to a single site near the distal end of mouse chromosome 8, arrows. (C) An ideogram of mouse chromosome 8 with an arrow marking the approximate site of the OVE459 transgene insertion between G-bands D2-E1.

[0063] FIG. 3 is a haplotype figure combining data from The Jackson BSB and BSS backcrosses showing part of Chromosome 8 with loci linked to D8Mlr1. Loci listed in order with the most proximal at the top. The black boxes represent the C57BL6/JEi allele and the white boxes the SPRET/Ei allele. The number of animals with each haplotype is given at the bottom of each column of boxes. The percent recombination (R) between adjacent loci is given to the right of the figure, with the standard error (SE) for each R.

[0064] FIG. 4 is a table summarizing the EST sequences and other published sequences that were used to assemble the Hydin full length cDNA sequence. “ACC#” is the accession number of the identified sequence, “exons represented” corresponds to the exon sequence identified and “DNA homology” is the comparison of the Hydin exon and the public sequence.

[0065] FIG. 5 sets out the predicted human Hydin cDNA sequence (SEQ ID NO: 14).

[0066] FIG. 6 sets out the predicted human Hydin protein sequence (SEQ ID NO: 15).

[0067] FIG. 7 sets out the a murine Hydin cDNA sequence that is extended within its 5′ untranslated region (SEQ ID NO: 16).

### DETAILED DESCRIPTION

[0068] The following examples illustrate the invention wherein Example 1 describes production of OVE459 transgenic mice, Example 2 demonstrates that OVE459 mice carry a recessive insertional hydrocephalus-inducing mutation, Example 3 demonstrates that OVE459 is an allele of hy3, Example 4 describes the cloning of the transgene insertion in OVE459 mice, Example 5 describes the genetic and physical mapping of the OVE459 transgenic insertion locus, Example 6 describes the cloning and sequencing of the Hydin cDNA, Example 7 describes the identification of the mutation responsible for hydrocephalus in the hy3 mouse and Example 8 describes the identification of homologs of the Hydin gene, in particular the human Hydin gene.

### Example 1

### Production of OVE459 Transgenic Mice

[0069] A transgenic construct, αA-BDNF/bFSH, designed to express brain derived neurotropic factor (BDNF) in the developing lens was produced by subcloning a human BDNF cDNA fused to the 3′ UTR of the bovine αFSH gene into the αA-crystallin promoter vector CPV2, replacing the SV40 intron and polyadenylation signal of CPV2. (Robinson et al., Development 121: 505-14, 1995) A schematic of the construct is depicted as FIG. 1. The 1,552 bp microinjection fragment (SEQ ID NO: 4) in pαA-BDNF/bFSH was isolated from the vector by digestion with SStII (Gibco/BRL, Gaithersburg, Md.), purified, and microinjected into FVB/N pronuclear stage mouse embryos as described in Taketo et al. (Proc. Natl. Acad. Sci. USA, 88: 2065-9, 1991).

[0070] The microinjection into the mouse zygotes resulted in the production of a single male transgenic founder for the transgenic line designated herein as OVE459. The transgenic founders were identified by PCR analysis using primers PR4 (5′-GCATTCCAGCTGCTGACGGT-3′: SEQ ID NO: 5), a sense primer complimentary to the murine αA-crystallin promoter, and 11421 (5′-ACACCTGGGTAGGCCAAGCCACCTT-3′; SEQ ID NO: 6), an antisense primer complimentary to human BDNF. A diagnostic band of 308 bp was amplified from genomic DNA of transgenic mice following 30 cycles of standard PCR with an annealing temperature of 58° C.

[0071] This founder appeared phenotypically normal in all respects including the eye. Three other transgenic founders were produced with a similar transgenic construct CPV2/BDNF differing from αA-BDNF/bFSH only by the replacement of the bovine αFSH 3′ UTR with the SV40 intron and polyadenylation signal of CPV2. These other BDNF transgenic founders also failed to exhibit any phenotypic abnormalities.

[0072] The founder for line OVE459 was bred to female FVB/N mice and transmitted the transgene to a portion of his progeny. These F1 hemizygous transgenic mice were phenotypically indistinguishable from their wild type littermates. When hemizygous OVE459 transgenic mice were interbred to produce homozygous transgenic mice, a portion of the pups in the resulting litters usually exhibited a failure to thrive and died, typically between the first and third week after birth. Closer examination revealed that the dying pups could most often be identified by 4-6 days after birth. The most severely affected of these mice died by about 10 days after birth. The less severely affected mice began to exhibit enlargement of the head that progressed until death, typically by 21 days, but always prior to 42 days after birth. Gross necropsy revealed that all affected mice exhibited enlargement of the brain ventricles and characteristic thinning and softening of the top of the skull vault consistent with congenital hydrocephalus. Males and females appear to be equally affected. No such phenotype was ever observed in pups from matings between hemizygous OVE459 mice and wild type mice. These observations led to the hypothesis that the transgenic line OVE459 carried a recessive, transgene-induced insertional mutation leading to congenital hydrocephalus.

[0073] Very rarely mice phenotypically typed as heterozygotes at weaning developed lethal hydrocephalus by six weeks of age. No nasal discharge among the homozygous hy3, OVE459 or double heterozygous mice was observed. It is possible that the lack of nasal discharge and increased penetrance of the hydrocephalic phenotype, relative toe that described by Berry (Berry, J. Path. Bact. 81: 157-161, 1961), relates to different sets of modifier loci present in the original and current hy3 stocks.

### Example 2

### OVE459 Mice Carry a Recessive Insertional Hydrocephalus-Inducing Mutation

[0074] Southern blot analysis determined that the OVE459 mice carried a recessive insertional hydrocephalus-inducing mutation. Genomic DNA was isolated from hydrocephalic and phenotypically normal OVE459 transgenic mice. Ten micrograms of genomic DNA per lane was digested with EcoRI, BamH I or NheI. Digested DNA was electrophoresed through agarose and transferred to a nylon filter as described in Robinson et al. (Dev. Biol., 198: 13-31, 1998). Blots were probed with the transgene-specific 1,159 bp XbaI fragment (SEQ ID NO: 7 or nucleotides 349-1511 of SEQ ID NO: 4) from pαA-BDNF/bFSH following random-prime labeling with ³²P-dCTP. Washing and exposure to X-ray film was carried out as described Robinson et al. 1998, supra.

[0075] Southern blots of genomic DNA from hydrocephalic and phenotypically normal OVE459 transgenic mice hybridized with a transgene-specific probe revealed identical hybridization patterns. Therefore all OVE459 transgenic mice carried the same transgene insertion site and different transgene integration sites could not explain the phenotypic variation among transgenic mice. These analyses also demonstrated that approximately 12-15 copies of the transgene inserted in a single genomic location. In most cases, the production of transgenic mice by pronuclear injection results in transgenic founders containing multiple copies of the transgene in a tandem head-to-tail array at a single genomic locus (Brinster et al. Cell, 27: 223-31, 1981), but more complex integration patterns are possible.

[0076] The presence of multiple copies of the transgene within OVE459 transgenic mice facilitated further analysis of this transgenic line by FISH to determine the chromosomal location where the OVE459 transgene inserted. FISH was also used to test the hypothesis that hydrocephalic mice were transgenic homozygotes and that transgenic mice without ventricular enlargement were hemizygous for the transgene.

[0077] FISH was carried out as reported in Majumder et al. (Mamm. Genome, 9: 863-868, 1998). Briefly, metaphase chromosome spreads were prepared from both a hydrocephalic and a phenotypically normal OVE459 transgenic mouse. The slides were stained with Giemsa for G-banding and photographed. The slides were then destained and hybridized with a 1,159 bp digoxigenin labeled probe containing the BDNF coding region (SEQ ID NO: 7). Previously photographed G-banded metaphase cells were used to determine the precise location of the transgene insertion. The chromosomes were counter-stained with 0.5 μg/ml propidium iodide in an antifade buffer and the preparations viewed with an Olympus BX60 epifluorescence microscope. Previously photographed G-banded metaphase cells were rephotographed using Kodacolor 100 Gold film.

[0078] The G-banding and the FISH analysis using the BDNF specific probe are shown in FIG. 2. As predicted, the hydrocephalic mouse was homozygous for the transgene and the non-hydrocephalic mouse was hemizygous for the transgene. FISH also revealed that the transgene array was within a single site near the distal end of mouse chromosome 8 (region D2-E1).

### Example 3

### OVE459 is an Allele of hy3

[0079] The spontaneous, recessive, hydrocephalus-inducing mouse mutation hy3 has also been genetically mapped to the distal portion of mouse chromosome 8. The reported phenotype for homozygous hy3 mutant mice closely paralleled the gross abnormalities in homozygous OVE459 transgenic mice. A breeding complementation experiment was carried out to determine if the insertional mutation in OVE459 represented a new allele of hy3. The gene responsible for the mutation in hy3 is unknown and there is currently no published molecular test to distinguish wild type from hy3 mutation carriers in progeny from known heterozygous mutant parents.

[0080] Six untested mice (3 males and 3 females) from the B6CBACa-A^{w-J}/A-hy3/+ colony at the Jackson Laboratory (Bar Harbor, Me.), stock number 002703 (the result of matings between two mice proven, by test breeding, to carry the hy3 mutation) were purchased and bred to hemizygous transgenic mice from the OVE459 line. As all homozygous hy3 mice die prior to sexual maturity, each of the six mice purchased from the Jackson Laboratory had a ⅔ probability of carrying the mutation. Therefore, according to the binomial distribution, the probability that none of the six mice carried the mutation was 0.0014. Considering this, we reasoned that if none of the six matings between potential hy3 carriers and transgenic OVE459 mice produced hydrocephalic offspring, the two mutations were unlikely to be allelic.

[0081] The resulting pups of untested and hemizygous OVE459 transgenic mice were genotyped for the presence of transgene by PCR and were anesthetized prior to perfusion with PBS followed by Bouin's fixative. Fixed brains were analyzed by gross inspection for signs of ventricular dilation. For determination of hydrocephalic frequency, reported in Table 2, only mating pairs where hydrocephalic pups were born were included for matings including presumed hy3 heterozygotes. Also, only those litters where all pups were accounted for and typed between 10 and 21 days after birth were counted. All OVE459 data are from mice maintained on an FVB/N inbred background. The hy3 mutation has been moved to an FVB/N inbred background since purchase from the Jackson Laboratory. To facilitate this genetic background change, the molecular markers D8Mit248 and D8Mit215 (polymorphic between the original hy3 genetic background and FVB/N) were used to identify likely carriers of the hy3 mutation. D8Mit248 and D8Mit215 are approximately 11 and 5 cM, respectively, on either side of where we believe the hy3 mutation to reside.

[0082] Four of these six mating pairs produced hydrocephalic offspring. The carrier status of these four (2 males and 2 females) potential hy3 heterozygotes was subsequently confirmed by interbreeding to obtain hy3/hy3 homozygous pups. Upon gross inspection of the pup's brains, the hydrocephalus in OVE459 homozygotes, hy3/hy3 homozygotes and double OVE459/hy3 heterozygotes was indistinguishable, both in terms of the kinetics and gross pathology. As expected, each of these hydrocephalic offspring, and all subsequent hydrocephalic offspring between OVE459 and hy3 mice, was positive for the transgene. The proportion of hydrocephalic offspring resulting from mating between OVE459 hemizygotes and between OVE459 hemizygous and hy3 heterozygous mice was very similar and approached the predicted 25% Mendelian ratio of an autosomal recessive trait with full phenotypic penetrance, as summarized in Table 2 below. The complete failure of the hy3 mutant allele to complement the OVE459 insertional mutation is the best evidence that these two mutations are allelic and very likely result in disrupted function in the same gene or set of genes on mouse chromosome 8.

TABLE 2
Frequency of Hydrocephalus Among Offspring of OVE459
and hy3 Matings

| Mating | Total Offspring | Hydrocephalic | Percentage |
|---|---|---|---|
| OVE459 × OVE459 | 829 | 199 | 24.0% |
| hy3 × hy3 | 584 | 130 | 22.3% |
| OVE459 × hy3 | 355 | 79 | 22.3% |
| Overall Total | 1768 | 408 | 23.1% |

### Example 4

### Cloning the Transgene Insertion Site of OVE459 Mice

[0083] In contrast to the spontaneous hy3 mutation, where no molecular markers are known, the insertion of the transgene in OVE459 mice provided a molecular tag into the genomic locus likely to contain the gene relevant to the hydrocephalic phenotype. Tight linkage of the hydrocephalus-inducing mutation to the OVE459 transgene insertion sight was suggested by the failure of the mutation to segregate away from the transgene in over 20 generations.

[0084] To clone the transgene insertion site, a genomic lambda pHydine library was constructed using DNA from homozygous OVE459 hydrocephalic mice. This library was screened using a transgene-specific hybridization probe (see FIG. 1 and SEQ ID NO: 7). Both the FISH data and the genomic Southern blot probed with a transgene-specific probe indicated that the transgene inserted in a single genomic location, and the Southern blot furthermore suggested that 12-15 copies of the transgene inserted in a tandem array. Since the microinjection construct was approximately 1.6 Kb, the tandem transgene array would be expected to be 19.2 to 24 Kb in length. Since the pHydine clones in the library kit used can only incorporate recombinant inserts of 9-23 Kb, it was unlikely that the entire transgene array with a significant length of flanking genomic DNA on both sides would be recovered. Therefore, we expected to recover three types of transgene-containing pHydine clones using the transgene-specific probe. The clones expected included those containing only transgene and those that contained transgene and the flanking genomic DNA on either the centromeric or telomeric side of the insertion site. Conveniently, in the lambda Fix II vector system used to make the library, both SalI and NotI digestion release the genomic insert from the vector arms. NotI, in contrast to SalI, also cuts the transgene construct once. This allowed the total length of the genomic insert as well as estimate the approximate proportion of the genomic insert that consisted of transgene copies to be estimated.

[0085] Of the four lambda clones analyzed in detail, two, designated BAA and CAA, were sequenced as follows. The BAA clone is located 5′ of the BDNF transgene while the CAA clone is located 3′ of the transgene. Initial insert end sequence was determined from purified DNA from lambda clones BAA and CAA using T3 and T7 sequencing primers present in the lambda vector pHydine arms. The unique genomic fragment in lambda clones BAA and CAA were subcloned into pBluescript KS- (Stratagene) as NotI fragments. The resultant plasmid clones pB19 and pC5 were approximately 14 and 16 Kb in size, respectively. Sequence was determined from each end of the plasmids using M13 and M13R primers. Template was prepared using Qiagen minipreps. Dye terminator chemistries were employed and sequence determined on an ABI377 automated sequencer. The GPS-1 Genome Priming system (New England Biolabs) was employed to introduce unique primer-binding sites in each construct per the manufacturer's directions. Internal sequence in each plasmid construct was determined using the PrimerS and PrimerN supplied with the kit. Sequence was determined as above using dye terminator chemistries. Non-transposon sequence was removed and the insert sequence assembled using PHRED/PHRAP/CONSED (Ewing and Green, Genome Res., 8: 186-94, 1998; Gordon et al., Genome Res., 8: 195-202, 1998).

[0086] The BAA clone was a unique clone consisting of an insert of 18 Kb. Restriction analysis revealed that clone BAA contained approximately five copies of transgene and a mouse genomic insert of 11 Kb. Another lambda clone, BCA contained a genomic insert consisting only of tandemly arranged transgene copies. The two remaining pHydine clones, CAA and DAA, appeared identical in restriction digests, consisting of a genomic insert of 16 Kb, approximately 3 Kb of which was transgene. Further restriction mapping and Southern blotting confirmed that clones DAA and CAA differed substantially from clone BAA, suggesting that these represented opposite sides of the transgene insertion. PHydine clones BAA and CAA were selected for further analysis and were sequenced as described above.

[0087] Sequence analysis revealed that the transgene array was on the long (23 Kb) pHydine arm side and the mouse genomic DNA was on the short (9 Kb) pHydine arm side in both pHydine clones as depicted in FIG. 3. The assembly of the BAA and CAA sequences is set out as SEQ ID NO: 8. The transgene is represented as “NNNNNNNNNNNNNNN” (see bases 12088-12102 of SEQ ID NO: 8) and is located between the CAA and BAA sequences.

[0088] Unique PCR primer sets were designed to amplify mouse genomic DNA near the distal ends of each pHydine clone, relative to the transgene insertion, using sequence information obtained using the T3 sequencing primer. The primer set derived from the sequence of the mouse genomic insert in pHydine clone CAA approximately 13 Kb from the transgene insert from the genomic region on the pHydine clone CAA clone were designated C1 (5′-CAAAAGAGCTGAGGAAAGATG-3′; SEQ ID NO: 9) and C2 (5′-TAGGATGCAGGGGGTTATT-3′; SEQ ID NO: 10).

[0089] The primer set derived from the sequence of the mouse genomic insert in pHydine clone BAA, approximately 11 Kb from the transgene insert, were designated B3 (5′-GGTCCGAGAAAC CTGCCTGCTATCA-3′; SEQ ID NO: 11) and B4 (5′-ACCCACGTCGCCTGTG TTCATTATG-3′; SEQ ID NO: 12). As expected, the PCR primers B3 and B4 from the shorter mouse genomic DNA insert in clone BAA, failed to amplify a band in the longer mouse genomic insert in clone CAA, confirming that these clones represent opposite sides of the transgene insertion.

### Example 5

### Genetic and Physical Mapping of the OVE459 Transgene Insertion Locus

[0090] The primer sets B3/B4 (SEQ ID NOS: 11 and 12) and C1/C2 (SEQ ID NOS: 9 and 10) were used to screen C57BL/6JEi and SPRET/Ei genomic DNA for polymorphisms that could be used to map the genetic location of the genomic DNA flanking the transgene insert in OVE459 using the Jackson Laboratory Backcross DNA Panel Mapping Resource as described in Rowe et al., (Mamm. Genome, 5: 253-74, 1994). Genomic DNA from all 188 animals in the combined Jackson BSS (C57BL/6JEi×SPRET/Ei)F1×SPRET/Ei] and BSB [(C57BL/6J×Mus spretus)F1×C57BL/6J] interspecific backcross mapping panels from the Jackson Laboratory Backcross DNA Panel Mapping Resource were genotyped for the PCR polymorphism with primers C1 and C2.

[0091] According to the sequence information from the OVE459 genomic clones, the B3/B4 and C1/C2 PCR primers should amplify DNA fragments of 327 bp and 415 bp respectively on FVB/N strain genomic DNA. No polymorphisms were detected using primers B3/B4. In contrast, while the primer set C1/C2 amplified an apparently identically sized band in both FVB/N and C57BL/6JEi DNA, a distinctly larger band was amplified in SPRET/Ei genomic DNA. This polymorphism was used to map the location of the genomic insert in clone CAA in both the BSS and the BSB mapping panel from the Jackson Laboratory consisting of a total of 188 backcross animal (Rowe et al., supra). The C1/C2 polymorphism mapped cleanly in both mapping panels and was assigned the nomen D8M1r1. D8Mlr1 does not recombine with D8Mit151 and was placed 5.32+/−1.64 cM distal to D8Mit313 and 1.06+/−0.75 cM proximal to D8Mit152n as depicted in FIG. 3. This position corresponds to approximately 54 cM on the mouse genome informatics chromosome 8 consensus linkage map as reported in Blake et al. (Nucleic Acids Research, 30: 113-5, 2002).

[0092] The interspecific backcross panels provided a precise genetic location for the genomic DNA on the CAA side of the transgene insertion, but as no mapable PCR polymorphism was identified on the opposite flank genetic mapping of the BAA side was not possible. Therefore, we screened a 129/Sv bacterial artificial chromosome (BAC) library (CITB Mouse BAC DNA library pool, Research Genetics, Huntsville, Ala.) using primers B3 and B4 to identify BAC clones that encompassed the OVE459 transgene insertion. BAC DNA clones positive for the B3/B4 primer set were screened with primers C1 and C2 using PCR. Additional BAC clones were identified in the RPCI-23 mouse BAC library by screening filter arrays obtained from Pieter de Jong (Children's Hospital Oakland Research Institute, Oakland, Calif.) by hybridization with the unique genomic inserts from pHydine clones BAA and CAA. The clone RPCI23-21B7 was completely sequenced by the NIH funded Genome Sequencing Network. The accession number for the complete genomic sequence of RPCI23-21B7 is AC069308.

[0093] Two BAC clones, 9N1 and 218P4, were positive for the B3/B4 primer set. Of these two clones, 218P4 was also positive for the C1/C2 primer set from the CAA genomic insert, showing that these two amplified regions are physically linked on a single BAC clone. The mouse genomic insert in BAC 218P4 was determined by pulsed field gel electrophoresis to be approximately 120 Kb in size. An additional C57BL/6J BAC clone, RPCI23-21B7, positive for markers on both sides of the transgene insertion site, was identified by hybridization. BAC 21B7 contained a genomic insert of approximately 240 Kb and completely encompassed the genomic region covered by BAC 218P4. From the complete sequence of BAC 21B7, we determined that the markers defined by primer sets B3/B4 and C1/C2 (D8Mlr1) are separated by approximately 51 Kb of wild type genomic DNA, and that the microsatellite markers D8Mit151 and D8Mit213 lie within the intervening sequence.

[0094] The sequence information obtained from BAC RPCI23-21B7 indicated that D8Mlr1 is only 47.8 Kb from D8Mit151. While transgene-induced insertional mutations can induce genomic rearrangements making cloning of the relevant genes difficult, these observations suggest the gene responsible for inducing hydrocephalus in hy3 homozygous mice is in close proximity to D8Mit151. Currently, there are no genes or family members of genes that have been previously associated with mammalian hydrocephalus near this region of mouse chromosome 8. The region encompassing D8Mit151 on mouse chromosome 8 corresponds to human chromosome 16q21-23. Haploinsufficiency of this region of 16q has been associated with general growth failure, perinatal death, facial bone dysgenesis, shortened limbs, and hydrocephalus (Fryns et al., Ann Genet., 24: 124-5, 1981; Naritomi et al., Clin. Genet., 33: 372-5, 1988; Rivera et al., Clin. Genet., 20: 465-99, 1985). This analysis provides the most precise location to date for the hydrocephalus-inducing gene in hy3 mutant mice. Hydrocephalus has also been reported in an infant with a balanced translocation t(4;16)(q35;q22.1) including this region (Callen et al. Clin. Genet., 38: 466-8, 1990; Taysi et al., Birth Defect, 14: 343-7, 1978). Furthermore, Sakuragawa and Yokoyama mapped the chromosome 16 breakpoint of this or a similar hydrocephalus-associated t(4;16)(q35;q22.1) translocation between haptoglobin and calretinin (Sakuragawa and Yokoyama, Cong. Anom. 34: 303-310, 1994). This group also discovered a rearrangement of genomic DNA within 1.2 Mb of calretinin using genomic DNA from fibroblasts carrying this translocation. Interestingly, according to the Mouse Genome Sequencing Consortium V3 Assembly, D8Mlr1 is approximately 376 Kb distal to calretinin on mouse chromosome 8.

### Example 6

### Cloning and Sequencing of the Hydin cDNA

[0095] BAC clone 218P4 (Research Genetics), described in Example 5, was used in a direct cDNA selection experiment to identify exons on the BAC that were expressed in the wild type neonatal mouse head. Direct cDNA selection technique, as described in Serge et al. (Genomics, 28: 549-59, 1995) and Del Mastro and Lovett (Methods Mol. Biol. 68: 183-199, 1997), allows for the isolation of expressed sequences in a large genomic clone using a complex cDNA pool from a tissue of interest. Briefly, total RNA was isolated from wild type embryonic day 17, newborn and post natal day 2 mouse heads. These developmental stages encompass the time points just prior to the onset of frank hydrocephalus in the OVE459 homozygotes. The RNA was pooled and mRNA was enriched by oligo dT selection, converted to cDNA, digested with restriction enzymes and ligated to linkers. The BAC218P4 was similarly digested and ligated to biotinylated linkers. Repetitive sequencing in the cDNA were blocked by a brief hybridization with Cot1 DNA (Life Technologies) and total DNA from homozygous OVE459 mutant mice. The BAC fragments were then mixed and hybridized to the cDNA fragments at 65° C. for 54 hours. Biotinylated BAC fragments and hybridizing cDNA fragments were isolated by streptavidin coated magnetic beads (Dynal). Selected cDNA's were amplified by PCR and subjected to another round of hybridization and selection prior to blunt end ligation using Novagen's perfectly blunt cloning system. A positive control BAC clone (BAC123), which is known to contain portions of the pola1 and Arx genes, was run in parallel.

[0096] This approach identified several exons that were determined to originate from two novel genes that were present, in part on BAC218P4. Subsequently, the identified exons were used to identify additional larger BAC clones encompassing the relevant genomic region. This screen identified RPC123-21B7, which the Trans-NIH Mouse Initiative sequenced at the Applicant's request. The RPCI23-21B7 sequence was assigned Accession No. AC069308. The RPCI23-21B7 complete sequence was used to order the exons discovered in the cDNA selection experiments.

[0097] Genomic sequence from human and mouse sequences within public databases and the Celera Genomics database were searched to identify regions of conserved homology in order to predict the location of additional exons. These regions of homology were further examined using splice site prediction software from the Drosophila Genome Project and Genio splice site prediction web site. This software allowed for predictions of the exon boundaries within the transcript. Subsequently, this information was compared to the National Center for Biotechnology Expressed Sequence Tag (EST) data base. The EST sequences identified as segments of the gene are summarized in FIG. 4. The RNA clones identified as segments of the Hydin gene are summarized in Table 3. The EST sequences and the RNA clones identified as segments of Hydin gene exons represent at least part of the corresponding exons.

TABLE 3
RNA Clones Identified As Segments of the Hydin Gene

| | | Exons | Method of | Nucleotide |
|---|---|---|---|---|
| Accession No. | Species | Represented | Prediction | Homology |
| XM_146514 | Mouse | 39-47, 48-80, | Computational | 100% |
| | | 82-87 | annotation | |
| XM_112453 | Mouse | 13-47, 48-80, | Computational | 100% |
| | | 82-87 | annotation | |
| XM_146514 | Mouse | 1, 3-9, 10-13 | Computational | 100% |
| | | | annotation | |
| XM_030075 | Human | 74-87 | Computational | 85% |
| | | | annotation | |
| AL137259 | Human | 75-87 | testis mRNA | 85% |
| | | | clone | |
| AK074472 | Human | 78-87 | lung mRNA | 85% |
| | | | clone | |
| AK02688 | Human | 81-87 | lung mRNA | 87% |
| | | | clone | |
| XM_171789 | Human | 43, 66-69, | Computational | 87% |
| | | 71-80, 81-85 | annotation | |
| NM_017558 | Human | 3-21 | Computational | 87% |
| | | | annotation | |
| BC028351 | Human | 3-16 | testis mRNA | 87% |
| | | | clone | |
| AK02688 | Human | 3-21 | teratocarcinoma | 87% |
| | | | RNA | |
| AB058767 | Human | 35-41, 44-48, | brain mRNA | N/A |
| | | 50-57 | | |
| AL834340 | Human | N/A | brain mRNA | N/A |
| AL833826 | Human | N/A | testis mRNA | N/A |
| | | | clone | |
| AK006604 | Mouse | N/A | testis mRNA | N/A |
| | | | clone | |
| AK016044 | Mouse | N/A | testis mRNA | N/A |
| | | | clone | |
| NM_032821 | Human | N/A | teratocarcinoma | N/A |
| | | | RNA | |
| AK027571 | Human | N/A | teratocarcinoma | N/A |
| | | | RNA | |
| AL122038 | Human | N/A | testis mRNA | N/A |
| | | | clone | |
| AL133042 | Human | N/A | testis mRNA | N/A |
| | | | clone | |
| AL122038 | Human | N/A | testis mRNA | N/A |
| | | | clone | |
| AK057467 | Human | N/A | testis mRNA | N/A |
| | | | clone | |

[0098] The identified computer-generated and EST-predicted exons and splice sites were confirmed by amplifying each exon from mouse brain RNA using RT-PCR and sequencing the resulting PCR product. These confirmatory experiments demonstrated that the computer-predicted exons were expressed in mouse brain and linked these predicted exons into a single transcript. TA consensus sequence for the novel gene, denoted herein as Hydin was derived. The full length genomic sequence of Hydin is set out as SEQ ID NO: 3, which contains at least 87 exons spanning approximately 344 kB. The locations of the exons within the genomic sequence are summarized in Table 4.

TABLE 4
Summary of Hydin Exons

| | Position within cDNA | Identified by | | |
|---|---|---|---|---|
| Exon | (SEQ ID | Exon Selection | | RNA clone with |
| Number | NO: 1) | Experiments | EST with Homology | Homology |
| 1 | 1-41 | N/A | BB664150, | XM_146513 |
| | | | BB641870 | |
| 2 | 42-223 | N/A | BB664150 | |
| 3 | 224-381 | N/A | BB664150, | XM_146513, |
| | | | BB641870, | NM_017558, |
| | | | BG771496, | BC028351 |
| | | | AU128584, | |
| | | | AL705531 | |
| 4 | 382-507 | N/A | BB664150, | XM_146513, |
| | | | BG771496, | NM_017558, |
| | | | AU128584, | BC028351 |
| | | | BF352665, | |
| | | | AL705531, | |
| | | | BF376220 | |
| 5 | 508-627 | N/A | BB664150, | XM_146513, |
| | | | BG771496, | NM_017558, |
| | | | AL705531BF352620, | BC028351 |
| | | | AU128584, | |
| | | | BF352665, | |
| | | | BF352642, BF376220 | |
| 6 | 628-762 | N/A | BG771496, | XM_146513, |
| | | | BF352620, | NM_017558, |
| | | | AU128584, | BC028351 |
| | | | BF352665, | |
| | | | BF352642, | |
| | | | AW901070 | |
| 7 | | N/A | BG771496, | XM_146513, |
| | | | BF352620, | NM_017558, |
| | | | BF352642, | BC028351 |
| | | | AW901070, | |
| | | | AL712790, | |
| | | | BQ352231 | |
| 8 | 963-1087 | N/A | BF352620, | XM_146513, |
| | | | BF352665, | NM_017558, |
| | | | BF352642, | BC028351 |
| | | | AL556977, | |
| | | | AW901070, | |
| | | | AW896634, | |
| | | | BQ352231 | |
| 9 | 1088-1289 | N/A | AL556977, | XM_146513, |
| | | | AW896634 | NM_017558, |
| | | | | BC028351 |
| 10 | 1290-1473 | N/A | N/A | XM_146513, |
| | | | | NM_017558, |
| | | | | BC028351 |
| 11 | 1474-1573 | N/A | N/A | XM_146513, |
| | | | | NM_017558, |
| | | | | BC028351 |
| 12 | 1574-1692 | N/A | N/A | XM_146513, |
| | | | | NM_017558, |
| | | | | BC028351 |
| 13 | 1693-1916 | N/A | N/A | XM_112453, |
| | | | | XM_146513, |
| | | | | NM_017558, |
| | | | | BC028351 |
| 14 | 1917-1984 | N/A | N/A | XM_112453, |
| | | | | NM_017558, |
| | | | | BC028351 |
| 15 | 1985-2220 | N/A | W26351, AA488706, | XM_112453, |
| | | | BQ448683, | NM_017558, |
| | | | AW893199 | BC028351 |
| 16 | 2221-2321 | N/A | W2635, AA431373, | XM_112453, |
| | | | BQ448683 | NM_017558, |
| | | | | BC028351 |
| 17 | 2322-2457 | N/A | W2635, AA431373 | XM_112453, |
| | | | | NM_017558 |
| 18 | 2458-2622 | N/A | W2635, AA431373 | XM_112453, |
| | | | | NM_017558 |
| 19 | 2623-2775 | N/A | AA431373, | XM_112453, |
| | | | BQ7768300 | NM_017558 |
| 20 | 2776-3014 | N/A | BQ560006, | XM_112453, |
| | | | BQ776830 | NM_017558 |
| 21 | 3015-3291 | N/A | BQ776830 | XM_112453, |
| | | | | NM_017558 |
| 22 | 3292-3435 | N/A | BG005773, | XM_112453 |
| | | | BQ7768300 | |
| 23 | 3436-3579 | N/A | BG005773, | XM_112453 |
| | | | BQ7768300 | |
| 24 | 3580-3893 | N/A | BQ776506, | XM_112453 |
| | | | BG005773, | |
| | | | BQ776830, | |
| | | | BE549744, AI689735 | |
| 25 | 3894-4031 | N/A | N/A | XM_112453 |
| 26 | 4032-4104 | N/A | N/A | XM_112453 |
| 27 | 4105-4215 | N/A | N/A | XM_112453 |
| 28 | 4216-4425 | N/A | N/A | XM_112453 |
| 29 | 4426-4563 | N/A | N/A | XM_112453 |
| 30 | 4564-4741 | N/A | N/A | XM_112453 |
| 31 | 4742-4869 | N/A | AW880607, | XM_112453 |
| | | | AW880545 | |
| 32 | 4870-5000 | N/A | AW880607, | XM_112453 |
| | | | AW880545 | |
| 33 | 5001-5137 | N/A | AW880607, | XM_112453 |
| | | | AW880545 | |
| 34 | 5138-5265 | N/A | AW880607, | XM_112453 |
| | | | BF361871 | |
| 35 | 5266-5457 | N/A | BF361871 | XM_112453, |
| | | | | AB058767 |
| 36 | 5458-5607 | N/A | BF361871 | XM_112453, |
| | | | | AB058767 |
| 37 | 5608-5847 | N/A | N/A | XM_112453, |
| | | | | AB058767 |
| 38 | 5848-6010 | N/A | BM725878 | XM_112453, |
| | | | | AB058767 |
| 39 | 6011-6184 | N/A | BM725878, | XM_112453, |
| | | | BM677992 | AB058767 |
| 40 | 6185-6358 | N/A | Al126146, BF567477, | XM_146514, |
| | | | BM725878, | XM_112453, |
| | | | BM67799 | AB058767 |
| 41 | 6359-6532 | N/A | N/A | XM_146514, |
| | | | | XM_112453, |
| | | | | AB058767 |
| 42 | 6533-6753 | N/A | N/A | XM_146514, |
| | | | | XM_112453 |
| 43 | 6754-6891 | N/A | N/A | XM_146514, |
| | | | | XM_112453, |
| | | | | XM_171789 |
| 44 | 6892-7075 | N/A | N/A | XM_146514, |
| | | | | XM_112453, |
| | | | | AB058767 |
| 45 | 7076-7217 | N/A | N/A | XM_146514, |
| | | | | XM_112453, |
| | | | | AB058767 |
| 46 | 7218-7386 | N/A | N/A | XM_146514, |
| | | | | XM_112453, |
| | | | | AB058767 |
| 47 | 7387-8004 | N/A | BB57329 | XM_146514, |
| | | | | XM_112453, |
| | | | | AB058767 |
| 48 | 8005-8226 | Exon Selection | BB57329, AL703616 | XM_146514, |
| | | | | XM_112453, |
| | | | | AB058767 |
| 49 | 8227-8435 | Exon Selection | AL703616 | XM_146514, |
| | | | | XM_112453 |
| 50 | 8436-8618 | Exon Selection | AL703616 | XM_146514, |
| | | | | XM_112453 |
| 51 | 8619-8738 | Exon Selection | BG999183, | XM_146514, |
| | | | AL703616 | XM_112453 |
| 52 | 8739-8898 | Exon Selection | BG999183 | XM_146514, |
| | | | | XM_112453 |
| 53 | 8899-9071 | N/A | N/A | XM_146514, |
| | | | | XM_112453 |
| 54 | 9072-9270 | Exon Selection | N/A | XM_146514, |
| | | | | XM_112453 |
| 55 | 9271-9370 | Exon Selection | BG829246 | XM_146514, |
| | | | | XM_112453 |
| 56 | 9371-9470 | N/A | BG829246 | XM_146514, |
| | | | | XM_112453 |
| 57 | 9471-9639 | Exon Selection | BG829246 | XM_146514, |
| | | | | XM_112453 |
| 58 | 9640-9875 | Exon Selection | BG829246 | XM_146514, |
| | | | | XM_112453 |
| 59 | 9876-9993 | Exon Selection | BG829246 | XM_146514, |
| | | | | XM_112453 |
| 60 | 9994-10198 | Exon Selection | N/A | XM_146514, |
| | | | | XM_112453 |
| 61 | 10199-10434 | Exon Selection | N/A | XM_146514, |
| | | | | XM_112453 |
| 62 | 10435-10586 | Exon Selection | N/A | XM_146514, |
| | | | | XM_112453, |
| 63 | 10587-10776 | N/A | N/A | XM_146514, |
| | | | | XM_112453 |
| 64 | 10777-10879 | N/A | N/A | XM_146514, |
| | | | | XM_112453 |
| 65 | 10880-11167 | N/A | N/A | XM_146514, |
| | | | | XM_112453 |
| 66 | 11168-11310 | N/A | BF078559 | XM_146514, |
| | | | | XM_112453, |
| | | | | XM_171789 |
| 67 | 11311-11529 | N/A | BF078559, BI560655 | XM_146514, |
| | | | | XM_112453, |
| | | | | XM_171789 |
| 68 | 11530-11690 | N/A | BI560655 | XM_146514, |
| | | | | XM_112453, |
| | | | | XM_171789 |
| 69 | 11691-11788 | N/A | N/A | XM_146514, |
| | | | | XM_112453, |
| | | | | XM_171789 |
| 70 | 11789-11984 | N/A | BG928962 | XM_146514, |
| | | | | XM_112453, |
| 71 | 11985-12197 | Exon Selection | BG928962 | XM_146514, |
| | | | | XM_112453, |
| | | | | XM_171789 |
| 72 | 12198-12336 | Exon Selection | BG928962, | XM_146514, |
| | | | BG9924300 | XM_112453, |
| | | | | XM_171789 |
| 73 | 12337-12502 | Exon Selection | BG928962, | XM_146514, |
| | | | BG992430 | XM_112453, |
| | | | | XM_171789 |
| 74 | 12503-12650 | Exon Selection | BG992430 | XM_146514, |
| | | | | XM_112453. |
| | | | | XM_030075, |
| | | | | XM_171789 |
| 75 | 12651-12858 | Exon Selection | BB616892 BG992430 | XM_146514, |
| | | | | XM_112453, |
| | | | | XM_030075, |
| | | | | AL137259, |
| | | | | XM_171789 |
| 76 | 12859-13080 | Exon Selection | BB616892, | XM_146514, |
| | | | BG992430 | XM_112453, |
| | | | | XM_030075, |
| | | | | AL137259, |
| | | | | XM_171789 |
| 77 | 13081-13250 | Exon Selection | BB616892 | XM_146514, |
| | | | | XM_112453, |
| | | | | XM_030075, |
| | | | | AL137259, |
| | | | | XM_171789 |
| 78 | 13251-13449 | Exon Selection | BF077884, | XM_146514, |
| | | | BB616892 | XM_112453, |
| | | | | XM_030075, |
| | | | | AL137259, |
| | | | | AK074472, |
| | | | | XM_171789 |
| 79 | 13450-13608 | Exon Selection | BF077884 | XM_146514, |
| | | | | XM_112453, |
| | | | | XM_030075, |
| | | | | AL137259, |
| | | | | AK074472, |
| | | | | XM_171789 |
| 80 | 13609-13886 | Exon Selection | BF093325 | XM_146514, |
| | | | | XM_112453, |
| | | | | XM_030075, |
| | | | | AL137259, |
| | | | | AK074472, |
| | | | | XM_171789 |
| 81 | 13887-14106 | Exon Selection | BF042472, BF093325 | XM_030075, |
| | | | | AL137259, |
| | | | | AK074472, |
| | | | | AK02688, |
| | | | | XM_171789 |
| 82 | 14107-14319 | Exon Selection | BF042472, | XM_146514, |
| | | | | XM_112453, |
| | | | | XM_030075, |
| | | | | AL137259, |
| | | | | AK074472, |
| | | | | AK02688, |
| | | | | XM_171789 |
| 83 | 14320-14483 | Exon Selection | T47371, BF042472 | XM_146514, |
| | | | | XM_112453, |
| | | | | XM_030075, |
| | | | | AL137259, |
| | | | | AK074472, |
| | | | | AK02688, |
| | | | | XM_171789 |
| 84 | 14484-14654 | Exon Selection | BE665278 | XM_146514, |
| | | | | XM_112453, |
| | | | | XM_030075, |
| | | | | AL137259, |
| | | | | AK074472, |
| | | | | AK02688, |
| | | | | XM_171789 |
| 85 | 14635-14865 | Exon Selection | BE665278, | XM_146514, |
| | | | BE935732, | XM_112453, |
| | | | BE935729, | XM_030075, |
| | | | | AL137259, |
| | | | | AK074472, |
| | | | | AK02688, |
| | | | | XM_171789 |
| 86 | 14866-15090 | Exon Selection | BE665278 | XM_146514, |
| | | | | XM_112453, |
| | | | | XM_030075, |
| | | | | AL137259 |
| | | | | AK074472, |
| | | | | AK02688 |
| 87 | 15091-15769 | Exon Selection | BE665278, | XM_146514, |
| | | | AW292266, | XM_112453, |
| | | | AV278035, | XM_030075, |
| | | | BB015925, | AK074472, |
| | | | BB555992, | AL137259, |
| | | | BQ840375, | AK02688 |
| | | | AI809964, AI693718, | |
| | | | AI69396, AI564238, | |
| | | | N50787M, | |
| | | | BF402637, | |
| | | | BF199199, BF199193 | |

[0099] The full length murine Hydin cDNA sequence is set out SEQ ID NO: 1 and the murine Hydin genomic sequence is set out as SEQ ID NO: 3. The murine Hydin cDNA encodes an open reading frame of at least 5120 amino acids (SEQ ID NO: 2). The first 58 amino acids are encoded by exon 2, which is an alternately spliced exon that is only present in a subset of Hydin transcripts. The amino acid starting at residue 59 is encoded by exon 3. Exon 1 is predicted to solely contain 5′ untranslated sequences. While it is possible that the Hydin protein has multiple potential initiation codons, is most likely that the methionine at residue 82 is the initiation site since its codon is within the best match for the Kozak consensus for eukaryotic translations. The upstream methionines at positions 75 and 78 are also reasonable matches for the Kozak consensus.

[0100] The predicted Hydin polypeptide contains a major sperm protein domain near the amino terminus. Major sperm protein domains are known to be involved in the molecular interactions underlying sperm motility. These domains oligomerise to form an extensive filament system that extends from sperm villipoda, along the leading edge of the pseudopod. Therefore, the Hydin protein is contemplated to be involved in mobility.

[0101] In situ hybridization studies indicated Hydin transcripts were expressed in the developing choroids plexus at midgestation of the developing mouse. High transcript expression was detected in certain portions of the ependyma in the newborn mouse brain, and in both upper airways of the lung and throughout the developing spermatids in the testis. Multiple tissue northern blot analysis demonstrated abundant transcript expression only in testes of adult mice.

### Example 7

### Identification of Mutation Responsible for Hydrocephalus

[0102] A spontaneous frame shift mutation was identified in exon 15 of the Hydin gene in homozygous hy3 mice. Sequence analysis was carried out on every exon predicted to be within the Hydin gene. This analysis confirmed that the homozygous hy3 mice had a deletion of a single base pair (cytosine) at base 1993 within exon 15. This deletion results in residue 577 and 578 being translated as an isoleucine and proline. This deletion results in a frame shift mutation which generates a stop codon (TGA) at residue 579. Therefore, the frame shift mutation would result in expression of a truncated Hydin protein, which would be missing the majority of the amino acid sequence. It is believed that the identified frame shift mutation is responsible for the development of hydrocephalus.

### Example 8

### Identification of Hydin Homologs

[0103] The mouse Hydin gene can be used to search the public database for exons of the human or other organism homologs of the mouse Hydin gene based on EST database searches and evaluation of the mouse human homology in corresponding regions of the respective genomes. For example, the following human BAC clones have been identified to share consensus sequences with the mouse Hydin gene described herein: BAC CTA-427H10 (Acc. No. AC130459), BAC RP11-240C17 (Acc. No. AC109135), BAC RP11-424M24 (Acc. No. AC027281) and BAC CIT987SK-A-911E12 (Acc. No. AC003964).

[0104] The cloning and sequencing techniques described in Example 6 were used to identify the human homologue from human testis RNA. The predicted full length human Hydin cDNA is set out as SEQ ID NO: 14 (FIG. 5). Currently, 95.5% of the predicted sequence has been confirmed by sequence analysis. The confirmed nucleotides of SEQ ID NO: 14 are as follows: nucleotides 141-7748; nucleotide 7929-14721; nucleotides 14777-15394. Northern blot analysis on RNA isolated from human testis detected expression of the human Hydin gene transcript that was 15.7 Kb. The predicted human Hydin polypeptide sequence is set out as SEQ ID NO: 15 (FIG. 6).

[0105] The present invention contemplates using the human Hydin gene and human Hydin polypeptide in a same or similar manner as described for the mouse Hydin sequences.

The application's sequence listing, which the Patent Office published only in electronic form, follows.

SEQUENCE LISTING (13 sequences)

SEQ ID NO: 1 - DNA, 15769 bp, Mus musculus
ggcagtgcagcaaaaagtggcgcgcaaaaagtgcagagacttcttccctaggaaaatggatggcaggtcccatgcccttccttcagctgttcctgccccgttctcaaaatgaccctgaagatcaaatgtgtggctaattatataaaggaaaaaatcccaaacgtgctcttcttatgcgaccctgaagcaagactgcaacagttaaccgcctctgtgcctctctgtgagcaaagaaaatatttcaaacagacaaataaaaggctagaggagtccatgggggccatgcatcggaagatggccaaagtgatctcaggactgcagagcaaagtcttaccacccatgagcccgaaggtggtcacagaggaggaagtgaaccggatgctgacaccctcagagttcctgaaagagatgtccctcaccacggagcagaaattggcaagtacaagaattatatgtcgaccgcagatcaccgaactcttagatatgggagaaacaacacatcaaaagttttccagagttgacttggatcaggccttgttccagccctttccgtctgaaatcatattccagaactattctccctgtgaagtctatgaggtgccattggttttaaggaacaacgacaaaatcccacggatggtaaaagttgttgaagaaagctcaccttactttaaaatcatcagccccaaagacatcggccacaaggtagcccctggtgtgccatctgtattccgaatcctcttcactccagaggagaacaaggattacgcccacatgttgacctgcatcaccgaaagagaaaagttcattgtgccggtaaaagccagaggggctcgagccatcctggactttcccgacgagctgaatttctccacttgccctgtgaagtacaacacccagaaggttctgctggtccgaaacattggcaacaaagactccatgttccacctcaaaactcgcagtccatactcagtagagccaacgggcgggattctcaacgtgggcgaatccatgcaactggaagtggattttgagccacagactgtgggcagtcacgatggaaaactcattgtgacttatgacacaggtgaaatggtatttgtatgtctctatggagttgccatagatgtgaatataagactggacaagaattcgttgatcatggagaaaacctacatatctctggccaaccagcggtctataaccattcacaatcgcactaatataattgcccacttccagtggaaggtgtttgccaccgaagaagaggaagacaaagaaaaatacaagatctgtgatggcctgaacaaggaggaaaagcaggaaaccagcatgatccttgaagacagcgtcttggatccctcgctccgagagcgcctctccatcatctcccggaccttcgagaaccagaggaaactggtccaaggagacagcatgctctttctggaccacgttttcacgatcgagcccccggaaggtgatgtctggcccaactcatccgctgaaatcactgtgtactttaacccgctagaggccaagctctaccagcagacagtttactgtgacatttcaggccgagagatccgcttgcccctccgaatcagaggagaaggaatggggcccaagcttcacttcaacttcgaattactggacattggcaaagttttcattggatctgctcactgttacgaggcaatcctgtccaacaagggcagcatcgatgccctctttaacgtcatccccccaacttcagccttgggggcctgctttgtcttcaatcctaaagaaggcatcattgaaccgagtggggtccaagctgtccagatctccttcagttctaccatcctggggtacttcgaagaagagttcctgattgatgtcaacgggtcccctgagcccgtgaaaatgaccattagaggctgtgtaattggacctacattccattttaatgtccctgcactgaactttgggaatgtttcctatggatttccccataccttgatgtgttccctcaataatacatctttggtccccatgaccttcaaactgcgtgtccgcggcgatggcgaaggcatgagtagcatcccaagttactctcaggagtcagacagcaagcaatggtccgggattaatacagaaatgcctaccacaaaacccaaagaattcaccatctctcccaacagtggcaccatccgtgcccagggctttactgccatcaaggtgaccttgtgttccaacaccgtgcagaaatacgagctggcgctggtggtagacgtggagggtatcggagaagaagtgctggcactcttaattacagccaggtgtgtggtccccaagctccagttggtgactacagaggtggactttgggcgctgcttcctgaagtacccatatgagaagaccatccagcttgtcaatcatgatgaccttcctggatgctataaggtcctgcctcagctgtatgagaattcaccccctgtgctgctctccagcccctccccctgtggggtcatctccccccacagcactgtgagcataccactagccttggagacacaggtcattggcgcacatcgatccatagtttacatctccgtctttgggagccaggaagcccctctggcatgtaacatacagagtattggagaaggccccgtgatcttcatacatcccactcaaatcgactttggcaatatctacgtcctgaaggacacctccagaattctccagctctctaaccagtccttcatccctgcagtatttcgggttcgcatggcaaacaagaaatccctttggacggttaaacccagtgagggtgcagttcctgcagaagatgacatcccactgacactgactgccaacctggacgacatagtgacgttcaaagacacggtcatcctggagattaagcatagtaacacctatcggatccccatccaggccaccgggattggttctaccattgtttccgacaaaccatttgctccagaactcaacttgggagcgcattttagcctggatacccactattaccgcttcaagctgaccaacaaaggacgccgagtccagcaactgttctggatgaatgatgacttccgccccaaggaaaagcagagcaagaaggaaccggggaaaaagggctctacttccagtagccgtcgccagtccaaggcctcccaggaacccacagataacgggaaccccgtgttccaactttaccccgtcaggatggagttgtacccgggacagacgattgacgtgatccttgaaggctattccgccacgcccaagaaagtcaaagagaagctggtgtgccaggccatcgtcggaacccagaagggcaaaagcttgctgatgtccgtgaacatcatctgcgagtttatagctccaatcatccagctctccgccaagcagctactatatcgactggaaaagaagccgaactctaacctggagtctgattaccagtccttggtgataaagaacatcaccaccctgcctgtgaacatgctgctctctacaaccagacccttcttcatatgtgagactgataagtccctactgcctgcaacccctaagcctataaaactggaggttgatgaggagaaacacctcctgatcaagtttgatccctcctacagaaacgacctgaacaactgggtggcagaagaggttctgtcaattaagtatctagaacaccctcaggtggacaacctgggcttgcgtgctgaagtgcattaccccaacctcagctttgaggtgatggacatagatttcggctgcatcctgaacgatactgaggtcattcgctacatcatgatcaccaactgcagccccttggttgtgaaattccgctggttcttcttggtggatgaggaggaaaatcagatcaggtttgcaccatgtatgaagccctacagcgccttcttgtcccagatggagtccatcgcggccacctcggtcaccgccagctctctggcagccccacacactgtagagtatacggagatggacttcagtgattccatcaagacgatccttatggatgacgaagctggacccgaagaaatcaaaaagcccgcgacatccaccatggtctcagaagcgataaaatacagctccgcgggaacggaaagaagccagagccagccggactacccagaatgcatgtggatctatgaacaggatgagatgctgtctattggaatagaagaagtgtttgacattctgcctctctacggagttctgcggccctacagcagccatcagatatcgtttaccttctatggacactgtgacatcatcgcccgggccaaagctctgtgtgaggtggaaggagggcccacctatgaagtactactgaagggggaggcgtccctggtcaactactcctttgacacgaaggacattaactatggattgcagctgtttgaccatgtcacagaacgtgaaatcacactgaaaaacactgggaaagttggctttgagttcaatgtactgtctaactaccggtcttcacaaaggaaccttctccctggagtaccacttatcctgcctctgtcgggttttatccagtcgaataaggagcaggtattgaaagtttactacttgcctggaatacctgaggtctttcaaagaaacttccagatacagatcgcccacctggtcccagaaaacatcaccctgtacggagagggcatctttccacgaatcagccttgacctacacaggaacctccaaggcaatgaaaagtatgaacacttcttggaacaagcaaagaaaaacgtagaaaaagagtacactaaatatgaggctgtcgatcaatatgaggtgatggctgaggaactcccagaggaggagaccgctgaaataagtgctcatgtccagatggaagtagagcgactcatagtccaagactatgccctggaacaccagagaagcatctccaataacaccgaggacatctacttcagtcagcggagttgccgaaaactcaccaaagtccagctgccagagtacatcctggacttcggctacattgtacttggtgacgtcagaacccacatcgtcaagatcaccaacaccagccacttccctgtgtccttccacgcagagaaacaggtccttcacgaaacaggcttcagcactgagctagaccgtgtaaagaacctgccttactatgagacagaaacatttgaagtgaggtgtgacccacaaggggctaatctccctgtggggaacaaagaagtcattctccccatcaaggtgtacggagggccaaccattcacctctgcctccaggccacggtgatcatcccaagtatgaccctgtcgtgcaacaaaatagagtttgccacgattcagtgtgggcagtgcatggtggaaacgatccagctttccaaccatctccaagtcccttgtgaatggttcgtccacaccccaaagtctactaacaagctggacaaacacatgccaaagtatttacggcggaagctgcaagccgagatgattcccaagtctcggatctttgagatccaacccacttctggcatcttggatcccggcgagagggctaatgtgcaagtgaaattcatgcccaaggaagagaaactttacagccagtctctgttgttccaaattggccagagctctcagaagctgacacttctggcccagggtcaaggcctggagccacgcctggagttcagcccttccgttctggaactggggcccctcctgccttttgcatcaggagatgaggccgaggtgattgtgaggaacccctgcaacttccccattgagttttactccctagaatttgaccagcagtatctcttagaagagaagatgttgcgacagctgaagggctacgactcctacaacaccctgctgctgcctccccggaacccaggggagaagctgccaccagaagtctatgattactttaaggagatgaagaaatcgaaagaggagcacatgaaggccaagtacatggagaacctggagaacgaagaggaagaaatgaatacgtctgaccaaggaaccaccagcacaaagaggacatcaattagccgagggatctcagtcacatccaacctggaagagcggcatctcacaattgaagccaaaaactacctagatgaggatgactatgaagaaagcctggaaaaactaacatttcaaaccgacaagatgcagagcacagacagccactccgtagaggaggttggagaggtggagagcaatccagtgagcaaggcaatcgcacgccacctgggcatcgacatttctgcagaaggccgcctggccaagaaccggaagggcatcgccattatcgtccacgggacgcccttgtcaggaaagacagccaatgccatcagcatggccaagttctacaacgcagcctgcctgaacattgactccatcgtcttagaagccctatcagacaccaacaacatcctagggattcgggcccgggagctgtgcatcagagctgccatagagcagtccatgagggaagcagaggagtcagctcatgagtcttcaatgacccaaaatactgtggtaccagcacgactaagcactgagaacttgggcaggtttacctcagagctcactctaataacccaggaatacaaagttccgaagaccgtgcgcgggagtgtgatgctccccaaaggcaaggcggacagccactttactgggtctcagaagcagcatcaccagcaccaatccgaaacaccgcaggtacagatctcctctagccctctcctccccggccccacccatcggcggctcagcgtcagcgccagtattggcggggagaccgggctgatgagctgcgtgctcccagatgacctcctcattcagatcctggctgagcggatacagctgagcaactgtttcagaggcgtggtgttcgacggcctggacacgctctttgcacggaatgcgccctctgccctccactgcctgctaaaggccatcggcagccgggagcacatctatgtcatcaacatgtctcaggattatgtcgtcatgaaagcccaggagaaggctaaaaaggagcaagaagagaacaaacgcaaggaagccctggcaaaggagaaggagcgtctccagacactggacgaggacgagtatgacgccctaacagcagaagagaaagttgcatttgaccgtgatgttcggcaggcactccgggagagaaagaagagggagctggaaagacttgccaaggagatgcaggagaagaagctgcagcaggagctggagaggcagaaggaagaggatgagctaaaacggaaggtcaaaaggcccaaagcaggccctgcggcaaaggaggagccacccctaaagaaagcacaaggcgccacaaacaagcagcttgctgcagttgccaagatagaattaaagatggaatcaatagaaaggaaagtttctgtcagagagcacgcaacacttgaagaaaccaccaggaagaagaaagccatgaccgaatacccactcttaattccaatttcccaagaacaagaggacagcgaaggagacttcctgaaggactctgacaagaacctggcacaaaagtttaaaatctacgacatgtgtctgaaggatgttcaaaacatcctcatgtattgggaccgcaagcaagggatgatggtacctcatacaggcacggacgagatgtcacatgaggctgacgaccagcgccaggcgccttcagggggcgggggtcgcaagggccgcaaggaccgggagagggagcgcttggagaaagagagggctgagaaggagcggctggaaagggagaaggctgagagggagcggctggagaagctgaaggccctggaggagcggagcgacgtggaaggggaaggggaagaggagcatgaaggaaagaaggatctcggggtgccctttatcaacatccagtctccagacttcgaaggtgtaagctggaagcaagctctggagagtgacaagcttcccaaaggagaccagatcctggacatcctaggcctggggtcctcaggaccacccatccctcctcccgtcttgttctccatcatctcttacccagcaaagcggcagtctttggtcgccacggagatcctaaagcactttgtgtttgtgattccaccaaacgatgacatccccctgatggacgagaaaaaagacccggaaggagattcagacatcttcctcaacaccatcataaccaaggctcaagaggaacaaccctctccacctaagggaagcaaacagaaattgaaagacaaaccagagcaagtgcgggaaactcagaaggaaaaacgacgcacttactccagcaggaaaggcctccctgggggaacatcggggagcattgttccgatgtctgacatagaccagaacagctttgatggagaacactcccaggagaagttcatcaggctgaatcacttccggtggattgtgcctccaaacggagaggtaaccttgagagtgcacttctcctctctagatgttggcaactatgaccagacgtttaatttcgagctccttgggacccgccgccaataccagctctactgccgcggagtctgcacctacccatacatctgcagagaccccaaagttgtgttttctcagaggaagaaagacatgaagttaaaagaagttgttgttaagaagtatgttgtgagcatggagaagttttactttgggccactgctttgtggaaagtcaagagacaagtataagtcatccttgttccctggcaacatggagacactgacgatcctgaatgattctccaatggtggtagaggcatacttctgtttccagcatgacataaaagcaagcacctactttctagagccggtcaacatgactctgaaacccaatgaaaagcaggcactaaacgtatgggcctaccctactgcagttggtatctttgaagacagcattgtctgctgcatcaaagagaacccagagccagccatctttaagttaagctgccaaggaattcgcccagaaattgaggtggagcccaggcagttacattttgaccgactcttgcttcataggaaagaaaccaagatagtaattctccgcaatgtcacgcctcttcctgtggcctggcggatctccaacctggaacacctaggggaggactttactgtgtccatgatgcagggcaccatgctacccaagggagagtatgggctgcaagtgcacttccagccctccaaacctgtcaacatcaagaaggccattcggattgaggttttggacgcagaaaatcttgttggtgtcgttcagatcgaaaacatcttgatctttgcagaatcgtatgatatcgctctggacatcaccttccctaaaggagctgaaggaggtctggattttgggactttgagggtcatggaggaggtaaagcagacccttcaactgaaaaaccgtggaaaatatgagatcatattcagcttcactgtggacaccttaggggttttgccaacaaacttaagttccatgatctcagtccaacccaagagggggacactggcctcaatagataagcccacaactgtccaggtgttcttccgagcaagaaaggaggtgaagatcgattgccagcccatcctgcgctgccagattattgagccaactctcccagaaggtgagatcattgccagcatccctattaagttttcggtgaatgcagtatactccaaattcaccatcagcccctcctccatcatcaattttggggctttgatctgcggtaccaggaaaagcatcaccttcaccatagaaaaccaaggcataatcgacttcaaatatgccctctacaggctgacaggggagagtccaattcttcaaaagaagataaccagccacatgaggcatggaagaacccgagagagtgaaagcttctacaagcctggagcaactaaaatggccaagttctcagacacagtccagaaagacacgaacatagcaaaccaggcccgcttcacccatggcatgttcactgtatacccaggattcggctccatcccttctggaggacagcaggtgatcaccattgagtgttttgcagaccctgtggggaggtgtgaagagtttctggccatcgatatctctgaccgagaccctagagaaaatcctgccggcatcccttacactctgcttgctgaagcatgtctgccagcctttgtgaccgacaacaacatcttgatatttgaggagcatcagatctgcaccagccccaacctgtaccacatcctacagaccatacagagtggggggctgttcgtggaggatgagaacaagttcatcttctgcaatgtcctggtgggtcatcaggccaaggctcggttcaagatcagcaacgtgggcaagatctcctgtgacatcaacattgtcatcaagcccatctccaacaagccggccaaccgcatcactgacacctttgacgtggaacccagcaagatgtgcatcgggagccgctcacatgccttcgtcacagtgctgttcacaccacagaccatgcagacctaccagtgcatcttcgaggccactttggatggcctgcccagcaacattgccaggagccgaggtcttgtgtttgatattgttggtgaggggactctccctcgagtgactgtcatccggccaactctatataaccaacacggaaaccccttgctcctgtttaagaggcttctgcttggtcattcggagaaactgcctctcatccttaagaataacggcaccatccccgcccagctgcatgtggacctgcgggaccaactaggagtcttctctctgaaagggagacccaccacctcctacatctacatcatggaggaaaataaaccgaatgaaaaagtcaagaaagcccacacggcctccctggttgtttctcctggagacacggctgaatttgatgtctttttccactccaataagattgggagaatgacaggcaccatccacttatcagtgatcaacaaccagtatgaggagaccatgatccacctggttggagaaagctacgaggatgacatcaccttggacaacatccatggactgatcagttccaccagccaggagagctcggataagtctgaagtcatagagatcgccgaggagagcaccatggaggacttggtgacagctgccctgatggaacacatccaatttgggtactgtcatattggaatcagctacaatgtgagcttcaccatcaccaaccacagccaagtgaatgtgattcgcttcgagtggccccttttagctacactgtccttctccccacagattgggcatctccaccctggctgttccaaggacgtggtggtgaccttgaaatcagaatcacccatcaccctgaagaagatgtgtgtcaagtgcaagctttccaagatcatgtttcagctccctgtagaccaggtccctgactgggatgaccgcatgcgcacagtcaagtgggtggatgctccccgaaatacacctctgaccttgaatacaaaacgaaaggtcatagagatggaccctgagccagcccactcggtggtagaagaaaattaccgagaattgcggatccagttcagtgccaatgtggattttgcttcatatcagtgtgaaacaactgaagtgttctttaaggaaacactggtttaccagacccgagtgtttgagtttgacctcgttaacacaggacaggtgctgttagaattctgctggatctcagaagaagcctccaaggcagtcagttttgccatgcctgagcgtcaaggttcaagtcaaaaagagctaagtcagggctcaggcagctccctggacagtgccctggaccgctggaccgaagcctcgccatcacccttctcagtggaacccccctcaggcgttgtgcccgtaggaaagactcaaaagctcaaagtgaagttctcgccaatggacatcggagagttcgagagctccttgtactgccaaattcccaacctcccacttggagaacaaggtcctattttgataacaaaagggcgaagcgtcctgccgttctgccactttgacctgaaggagtcggactacatcagtggtcatcggcgcaacccagagctccgaggaccaggcgctgggcctctcgaacctaatacccgtgtgattgagttcaccagtgtgggcatcggtgggaagaatgtccagaccttcacaattctgaacccgaccaacagcacctattctttctgctggacctctgaagagacggaaagtctccagcaccctccggcctttgtgtgtcttacagaaaagggtatcatccaccctgagaagaaagctgagattatattccagttcctgccggctcacctggacatcacggaagagttctggactttctctatcccagagcataatatctcagtccccttcctgctggtgggcaagaccacagacccccttatctctcttgacaagtctcacctcaatttcagctctctcctcattggcagagaagcccgagagacagtaaagatcatcaacaaggaggagcaagggttcaatttcgccttccaggacaactcccgctattctgaaggattcaacaacagcctcattgtatgccccatggaaggctggatcccgccactgtccaggttcccagttgatattttcttcacaccaaagcaagaaggagatgtgaacttcaatttgatctgcaatataaaaaagaaagctcaccctctgacactcaacgtcaaggccgagggctacactatgaatgctgaggtcaagtgcagagacaggatgggcaccaccatcctcctgacatccacccaggtcaacaccatcaacttctacgaggtggagttgaatgaatgtgttcagtgtgaattcagtttcatcaacacgggcaagttcaacttcagctaccaggcagagctctctggaccaaaactcctgttgcaatacttggacttcacacccaccgacagtagcgtagacgtgggtcagtctgaaccggccaacctgtcattccaaccgtatcagaagtgtgtcttgaagggcctggaactcaaaatcaagatcagccatggcccaacattcgtatgcaacatcttaggctgtgctgtgagcccagctgtccatttctccttcaccagccacaactttgggacttgcttcatctaccaagctgggatgcctccatataagcaaatcctcgttgtcaccaacaaagaagaaacatctatgagcctagattgtttgtacaccaacaccccacacatcgaggtgaacttcaacgtggacgtgataaagccagggaagaccctggagatcccaatcaccttttaccctcgggaagctatcagctaccgagaactcatcccctttgaaatcaatggactctctcaacagacagtggagatcaaagggaagggcacagaaatgaagcttttagtcctagacccagccaacaggatcgtgaagttaggagctgtcctgccaggacaggttgtgaggaaaacagtctccctcgtcaacaacagccttgcccagctcacctttaatcactcggtcctgttctctattccagagctccaggaagccaaggtcatcaccttggagcccttccacacgatcaccatgaagcctaaagaagtctgtaaactagagattacctttgcccccaagaagcgagtccctcctttctctgaggaagtcttcatggaatggatggggctcctgcgtcctctcttcctcctcagtggctgttgtcaggccctggagatttccctggaccaagagcatcttccctttggccccgttgtgtatcaaactcaagccacgcggcgcattctcataatgaacacaggcgacgtgggtgcaaggtttaaatgggatgtcaagaaactcaagccccacttctccattagccccgaagaaggctacatcatctcaggcacagaggtggctctagaagtaacataccaccccactgagatagggaaggagagtctctataaaaacattctctgcttcatccaaggaggaaatcctctgtgcctcaccctgtctggaacctgtgtgggaccacctgtggtaaaagaggtggtgaatttcaactgccaagtgcgctccaggcacacacagaccatcctgctctcaaaccgttccaaccagacctggaacctgcaccccatttttgagggtgagcactgggaggggcccgagttcatcaccttggaggcccatcagcaaaacaagccctatgagatcacctacaagccccgaaccatgaatctggagaatcgcaagcaccagggcactctctttttcccactccccgatgggactggctggctatatgccctgcacgggactgccgaactccccaaagctgttgccaatatctaccgtgaggttccatgtaagactccctataccgagctcctgccaatcagcaactggctgaacaagccccagagattccgggtcattgtggaaatattgaaaccagagaagacagacctaagtgtcaccctgaagggccttgattacattgatgttctgtctggctccaagaaagactacaagctgaacttcttttcctacaaggagggactgtacactgcaaaggtgatcttccggaacgaggtgaccaacgagttcttatactatactgtgagcttcagggtcaccccttctggcattataaaaaccatccagatgacaagcccagtccgccagagtgtatcagcctccatcaagttggagaaccccctgccctactcagtgaccttttcaacagaatgcaagttgagtgacattagcctgccttcccagttcgctgtgcctccaaactctgagggaacattctcatttgaattccagcccctgaaagctggagaactatgcgggagactgaccttgcacaacagtgacttgggttactaccagtacgagctcgctctgaaggccttgcctgcacctcccgagaaacccgtccacttccagaccgttcttggcagcagccagagcatcttagcaaagttcaccaattatacccggttgaagacagagtactactgcaagactgactgttctgacttccacacagaaaaagttattaacgcagccccaggagcccagggtggcactgaagtcagcgtggaagtcttctttgagcccagccatctgggtgagactaaaggcatcctgtgcctatcgtcactcataggtggggaatatatcatcccactctttggaattgctctgccccccaaaccccaaggtcccttcctaatcagagccggatacaacatcatcatccccttcaagaatgtcttcttgcatgcaacaagcttctccttcattgtggagaacccagccttcagcatccgggctgcagagaccgtgcggcccaagaagatcaacaacatcacagtctactttgaggggaacccgtcgggcagtaaaaccccgatcacctctaagttgattgtcacctgccctcagtgtgaaggcaccgaatctggaatcaaatgggtttattatctgaaggggatcaccccttaggtgacaactgtgtcaactggcggccttccactcagcctatgagccatgcctcatgctgtcccaacaaagaataggggaattttccaaggactttcttgtatgtgtttagttgtaagagaagtgatttctatattatattttacaagcacagatgtaaaatttatgttccacattaaaatttatagtggcacacaac

SEQ ID NO: 2 - protein, 5173 aa, Mus musculus
ENGWQVPCPSFSCSCPVLKMTLKIKCVANYIKEKIPNVLFLCDPEARLQQLTASVPLCEQRKYFKQTNKRLEESMGAMHRKMAKVISGLQSKVLPPMSPKVVTEEEVNRMLTPSEFLKEMSLTTEQKLASTRIICRPQITELLDMGETTHQKFSRVDLDQALFQPFPSEIIFQNYSPCEVYEVPLVLRNNDKIPRMVKVVEESSPYFKIISPKDIGHKVAPGVPSVFRILFTPEENKDYAHMLTCITEREKFIVPVKARGARAILDFPDELNFSTCPVKYNTQKVLLVRNIGNKDSMFHLKTRSPYSVEPTGGILNVGESMQLEVDFEPQTVGSHDGKLIVTYDTGEMVFVCLYGVAIDVNIRLDKNSLIMEKTYISLANQRSITIHNRTNIIAHFQWKVFATEEEEDKEKYKICDGLNKEEKQETSMILEDSVLDPSLRERLSIISRTFENQRKLVQGDSMLFLDHVFTIEPPEGDVWPNSSAEITVYFNPLEAKLYQQTVYCDISGREIRLPLRIRGEGMGPKLHFNFELLDIGKVFIGSAHCYEAILSNKGSIDALFNVIPPTSALGACFVFNPKEGIIEPSGVQAVQISFSSTILGYFEEEFLIDVNGSPEPVKMTIRGCVIGPTFHFNVPALNFGNVSYGFPHTLMCSLNNTSLVPMTFKLRVRGDGEGMSSIPSYSQESDSKQWSGINTEMPTTKPKEFTISPNSGTIRAQGFTAIKVTLCSNTVQKYELALVVDVEGIGEEVLALLITARCVVPKLQLVTTEVDFGRCFLKYPYEKTIQLVNHDDLPGCYKVLPQLYENSPPVLLSSPSPCGVISPHSTVSIPLALETQVIGAHRSIVYISVFGSQEAPLACNIQSIGEGPVIFIHPTQIDFGNIYVLKDTSRILQLSNQSFIPAVFRVRMANKKSLWTVKPSEGAVPAEDDIPLTLTANLDDIVTFKDTVILEIKHSNTYRIPIQATGIGSTIVSDKPFAPELNLGAHFSLDTHYYRFKLTNKGRRVQQLFWMNDDFRPKEKQSKKEPGKKGSTSSSRRQSKASQEPTDNGNPVFQLYPVRMELYPGQTIDVILEGYSATPKKVKEKLVCQAIVGTQKGKSLLMSVNIICEFIAPIIQLSAKQLLYRLEKKPNSNLESDYQSLVIKNITTLPVNMLLSTTRPFFICETDKSLLPATPKPIKLEVDEEKHLLIKFDPSYRNDLNNWVAEEVLSIKYLEHPQVDNLGLRAEVHYPNLSFEVMDIDFGCILNDTEVIRYIMITNCSPLVVKFRWFFLVDEEENQIRFAPCMKPYSAFLSQMESIAATSVTASSLAAPHTVEYTEMDFSDSIKTILMDDEAGPEEIKKPATSTMVSEAIKYSSAGTERSQSQPDYPECMWIYEQDEMLSIGIEEVFDILPLYGVLRPYSSHQISFTFYGHCDIIARAKALCEVEGGPTYEVLLKGEASLVNYSFDTKDINYGLQLFDHVTEREITLKNTGKVGFEFNVLSNYRSSQRNLLPGVPLILPLSGFIQSNKEQVLKVYYLPGIPEVFQRNFQIQIAHLVPENITLYGEGIFPRISLDLHRNLQGNEKYEHFLEQAKKNVEKEYTKYEAVDQYEVMAEELPEEETAEISAHVQMEVERLIVQDYALEHQRSISNNTEDIYFSQRSCRKLTKVQLPEYILDFGYIVLGDVRTHIVKITNTSHFPVSFHAEKQVLHETGFSTELDRVKNLPYYETETFEVRCDPQGANLPVGNKEVILPIKVYGGPTIHLCLQATVIIPSMTLSCNKIEFATIQCGQCMVETIQLSNHLQVPCEWFVHTPKSTNKLDKHMPKYLRRKLQAEMIPKSRIFEIQPTSGILDPGERANVQVKFMPKEEKLYSQSLLFQIGQSSQKLTLLAQGQGLEPRLEFSPSVLELGPLLPFASGDEAEVIVRNPCNFPIEFYSLEFDQQYLLEEKMLRQLKGYDSYNTLLLPPRNPGEKLPPEVYDYFKEMKKSKEEHMKAKYMENLENEEEEMNTSDQGTTSTKRTSISRGISVTSNLEERHLTIEAKNYLDEDDYEESLEKLTFQTDKMQSTDSHSVEEVGEVESNPVSKAIARHLGIDISAEGRLAKNRKGIAIIVHGTPLSGKTANAISMAKFYNAACLNIDSIVLEALSDTNNILGIRARELCIRAAIEQSMREAEESAHESSMTQNTVVPARLSTENLGRFTSELTLITQEYKVPKTVRGSVMLPKGKADSHFTGSQKQHHQHQSETPQVQISSSPLLPGPTHRRLSVSASIGGETGLMSCVLPDDLLIQILAERIQLSNCFRGVVFDGLDTLFARNAPSALHCLLKAIGSREHIYVINMSQDYVVMKAQEKAKKEQEENKRKEALAKEKERLQTLDEDEYDALTAEEKVAFDRDVRQALRERKKRELERLAKEMQEKKLQQELERQKEEDELKRKVKRPKAGPAAKEEPPLKKAQGATNKQLAAVAKIELKMESIERKVSVREHATLEETTRKKKAMTEYPLLIPISQEQEDSEGDFLKDSDKNLAQKFKIYDMCLKDVQNILMYWDRKQGMMVPHTGTDEMSHEADDQRQAPSGGGGRKGRKDRERERLEKERAEKERLEREKAERERLEKLKALEERSDVEGEGEEEHEGKKDLGVPFINIQSPDFEGVSWKQALESDKLPKGDQILDILGLGSSGPPIPPPVLFSIISYPAKRQSLVATEILKHFVFVIPPNDDIPLMDEKKDPEGDSDIFLNTIITKAQEEQPSPPKGSKQKLKDKPEQVRETQKEKRRTYSSRKGLPGGTSGSIVPMSDIDQNSFDGEHSQEKFIRLNHFRWIVPPNGEVTLRVHFSSLDVGNYDQTFNFELLGTRRQYQLYCRGVCTYPYICRDPKVVFSQRKKDMKLKEVVVKKYVVSMEKFYFGPLLCGKSRDKYKSSLFPGNMETLTILNDSPMVVEAYFCFQHDIKASTYFLEPVNMTLKPNEKQALNVWAYPTAVGIFEDSIVCCIKENPEPAIFKLSCQGIRPEIEVEPRQLHFDRLLLHRKETKIVILRNVTPLPVAWRISNLEHLGEDFTVSMMQGTMLPKGEYGLQVHFQPSKPVNIKKAIRIEVLDAENLVGVVQIENILIFAESYDIALDITFPKGAEGGLDFGTLRVMEEVKQTLQLKNRGKYEIIFSFTVDTLGVLPTNLSSMISVQPKRGTLASIDKPTTVQVFFRARKEVKIDCQPILRCQIIEPTLPEGEIIASIPIKFSVNAVYSKFTISPSSIINFGALICGTRKSITFTIENQGIIDFKYALYRLTGESPILQKKITSHMRHGRTRESESFYKPGATKMAKFSDTVQKDTNIANQARFTHGMFTVYPGFGSIPSGGQQVITIECFADPVGRCEEFLAIDISDRDPRENPAGIPYTLLAEACLPAFVTDNNILIFEEHQICTSPNLYHILQTIQSGGLFVEDENKFIFCNVLVGHQAKARFKISNVGKISCDINIVIKPISNKPANRITDTFDVEPSKMCIGSRSHAFVTVLFTPQTMQTYQCIFEATLDGLPSNIARSRGLVFDIVGEGTLPRVTVIRPTLYNQHGNPLLLFKRLLLGHSEKLPLILKNNGTIPAQLHVDLRDQLGVFSLKGRPTTSYIYIMEENKPNEKVKKAHTASLVVSPGDTAEFDVFFHSNKIGRMTGTIHLSVINNQYEETMIHLVGESYEDDITLDNIHGLISSTSQESSDKSEVIEIAEESTMEDLVTAALMEHIQFGYCHIGISYNVSFTITNHSQVNVIRFEWPLLATLSFSPQIGHLHPGCSKDVVVTLKSESPITLKKMCVKCKLSKIMFQLPVDQVPDWDDRMRTVKWVDAPRNTPLTLNTKRKVIEMDPEPAHSVVEENYRELRIQFSANVDFASYQCETTEVFFKETLVYQTRVFEFDLVNTGQVLLEFCWISEEASKAVSFAMPERQGSSQKELSQGSGSSLDSALDRWTEASPSPFSVEPPSGVVPVGKTQKLKVKFSPMDIGEFESSLYCQIPNLPLGEQGPILITKGRSVLPFCHFDLKESDYISGHRRNPELRGPGAGPLEPNTRVIEFTSVGIGGKNVQTFTILNPTNSTYSFCWTSEETESLQHPPAFVCLTEKGIIHPEKKAEIIFQFLPAHLDITEEFWTFSIPEHNISVPFLLVGKTTDPLISLDKSHLNFSSLLIGREARETVKIINKEEQGFNFAFQDNSRYSEGFNNSLIVCPMEGWIPPLSRFPVDIFFTPKQEGDVNFNLICNIKKKAHPLTLNVKAEGYTMNAEVKCRDRMGTTILLTSTQVNTINFYEVELNECVQCEFSFINTGKFNFSYQAELSGPKLLLQYLDFTPTDSSVDVGQSEPANLSFQPYQKCVLKGLELKIKISHGPTFVCNILGCAVSPAVHFSFTSHNFGTCFIYQAGMPPYKQILVVTNKEETSMSLDCLYTNTPHIEVNFNVDVIKPGKTLEIPITFYPREAISYRELIPFEINGLSQQTVEIKGKGTEMKLLVLDPANRIVKLGAVLPGQVVRKTVSLVNNSLAQLTFNHSVLFSIPELQEAKVITLEPFHTITMKPKEVCKLEITFAPKKRVPPFSEEVFMEWMGLLRPLFLLSGCCQALEISLDQEHLPFGPVVYQTQATRRILIMNTGDVGARFKWDVKKLKPHFSISPEEGYIISGTEVALEVTYHPTEIGKESLYKNILCFIQGGNPLCLTLSGTCVGPPVVKEVVNFNCQVRSRHTQTILLSNRSNQTWNLHPIFEGEHWEGPEFITLEAHQQNKPYEITYKPRTMNLENRKHQGTLFFPLPDGTGWLYALHGTAELPKAVANIYREVPCKTPYTELLPISNWLNKPQRFRVIVEILKPEKTDLSVTLKGLDYIDVLSGSKKDYKLNFFSYKEGLYTAKVIFRNEVTNEFLYYTVSFRVTPSGIIKTIQMTSPVRQSVSASIKLENPLPYSVTFSTECKLSDISLPSQFAVPPNSEGTFSFEFQPLKAGELCGRLTLHNSDLGYYQYELALKALPAPPEKPVHFQTVLGSSQSILAKFTNYTRLKTEYYCKTDCSDFHTEKVINAAPGAQGGTEVSVEVFFEPSHLGETKGILCLSSLIGGEYIIPLFGIALPPKPQGPFLIRAGYNIIIPFKNVFLHATSFSFIVENPAFSIRAAETVRPKKINNITVYFEGNPSGSKTPITSKLIVTCPQCEGTESGIKWVYYLKGITP

SEQ ID NO: 3 - DNA, 450000 bp, Genomic clone
  MISC_FEATURE (2073)..(2172): N = A or T or G or C
  MISC_FEATURE (3420)..(3737): N = A or T or G or C
  MISC_FEATURE (5899)..(6353): N = A or T or G or C
  MISC_FEATURE (17537)..(17921): N = A or T or G or C
  MISC_FEATURE (19832)..(19931): N = A or T or G or C
  MISC_FEATURE (21220)..(21319): N = A or T or G or C
  MISC_FEATURE (29502)..(29646): N = A or T or G or C
  MISC_FEATURE (41230)..(41329): N = A or T or G or C
  MISC_FEATURE (68440)..(68539): N = A or T or G or C
  MISC_FEATURE (71834)..(72093): N = A or T or G or C
  MISC_FEATURE (85234)..(85384): N = A or T or G or C
  MISC_FEATURE (88262)..(88690): N = A or T or G or C
  MISC_FEATURE (94651)..(94750): N = A or T or G or C
  MISC_FEATURE (95883)..(96032): N = A or T or G or C
  MISC_FEATURE (103632)..(103731): N = A or T or G or C
  MISC_FEATURE (106681)..(110052): N = A or T or G or C
  MISC_FEATURE (124451)..(124550): N = A or T or G or C
  MISC_FEATURE (128005)..(128104): N = A or T or G or C
  MISC_FEATURE (189546)..(190753): N = A or T or G or C
  MISC_FEATURE (194170)..(194269): N = A or T or G or C
  MISC_FEATURE (215581)..(215680): N = A or T or G or C
  MISC_FEATURE (218918)..(219334): N = A or T or G or C
  MISC_FEATURE (220471)..(220570): N = A or T or G or C
  MISC_FEATURE (224567)..(224790): N = A or T or G or C
caccacatccgctgctgctgtagttgggaaacccacatactggtagggttttaaaaaaaaatagataaagaaagccttggtttgtttaaaaaaaaaaaaaagcccccaatgcatcctctactcctgctcctggccaaccaggctaggggagccgccccctccccccaggttcccttcaggacgctcagctttctcgagcctctgaaactggtgatgggggtaagaagcaagaagggagagtgaggtttggagacctgtggctacgggactggaagcagggcgttagcttgaaggaaaaggtgaggaaggaggcaggggaatgtgtcatgggagcctttttttgcctaggcctcctctctgggaacgctcagacttgctcagaacctgggccctggccaccctgcattgggaaaacttactgacagttgccaccagggcagccgggcatttccccgaactcaagaccccagcaggctctgccacagaacaaaccacttgggggcgaagcatacctacccgcattgagccatgcccctgacccctttgccaagctcaggtccccgagggtcaaggggcccagaagttgggagctttactgaccgtcagcatcaaagtgcttccagatttccaggaactgggatgcagtcagctcggccaggtgcaggtaagggggctgctgctgcgggccagccatggcgagccgctccggagatcttaagcctctctctcagcgcgctgtcactcggtgccgcttggctctggttctcgcgctggggctgcgcgccacgctgcctttatatgcagcccggagctgcgccgcgtcgggccgccggaagggggcgcgcacactcagggaatcgcgcagggcgcggcgctgcacgggcgggggctcttctctgccagggttcctggggaccgggagagagtgttcaatgagacttctgggtgccctccggggacaccgcaggtatttagctggaaatggggagaggcagctcctgccttcccttccctctgtccatcttgagcacacccagtttctagtcgcagcaatagcattattaacaagtagcaaagctaagatttgagcccagaactcttcctgtcctgtgactccctcgaggggtaccaggattgcaggaaagcagggttctcaaggttttaccgtaggtggacaactggaatcgacaaggtgcaatgaggattcagatgggaatggaggaactactccactgttcagtaacccacttccctccggtatctgtcacatcctgcagacttttagacctttatccaggtagtagcagactggagcctcccgtagtcccgtaggtagatggcggtaaactctgacccaaagatgtgctgaacttctgttaaagaaaacagacagcaagcacagcacaccgtggggtctcctcaatcagagagccagcctccgtcccatatcctccctactctaaaggtctgcagtgtgtgcttgcttcttggacaccttaccttcagagcaacagcaagcaccctgcccctaaaaagaaggacagagacttgaattgctgctcattaacatgtgctaatgagtgttagctgagctgccttcgaagggagagcaaaagagaaggaggtgagaatctaaagcaggtcgctaggggagaggagaacccggggtggggtgggggggaggggggggagcggagaagagcaggctgtttcctggggtcaggttgaggtagctcggagctaacctcaaagggcaacatggagcccaagtttcaaaactgctggtgtgttgcccaggcacacagtttgaggttgtttacaagaacagactgggaaagacgcagcaaaataggctaactgttggggcttctgtaacccagcattccttgctgccagggctgagaaattactaagctagagtcccccagcctgagtcttgccttcgagaaggcaagaaggctcagtcctaaagaacagttgcaatagaatcaaactcctcgggtctagttcctaaacaaacaacaacaaaacctccacaacgttgtttggcttacacagcctgtctgtgccttnnnnnnnnnnnnnnnnnnnnnnnnnnnnnnnnnnnnnnnnnnnnnnnnnnnnnnnnnnnnnnnnnnnnnnnnnnnnnnnnnnnnnnnnnnnnnnnnnnnntgtcatggtgggggcctgtgggggggagaaggctccttatcttgtggccaggaagtgaaaaagagggagggagttgaaaggagaggaggaagacaagagaacaagacacagcctccatggacattcgaatgacttgttacctcccagttagtcctatctccttcagtgtattcagttatggacctgtcaatggattgatccagagaggaagtcaaagccctaaccatccatccactttcccttccccaaatcccacctctgaacacccggcccactagaagccaagcctttaacacggaagcctttggagtctgttccagattcaaactcttagctttctgcaacccccaccccaccccgaagttgctactgcttcctagaagggcgaatgccagggtgaggtccaggggcagatgagataggtgatgtttccagaataccagcttttaaactcctaggcacccaagggactagcctcagacctcctggctctagcatctgccctcggggttccttggagttgcctctggctccctcccagcctgggtatgcaggcagaagctgtttgctgggtctgtaaacatccaaggcagtgcccgagtcttccttcccagggctgctgaagccaggggaagatggctccgggtatgactacaaaggactgaccactgtggaccccaaatgatgcatcgggacagtctccattgttcactttggaggcaccaagagagtctgtttctgggggccatttttgcttgtctcggtcgtgtgccctcatgggggaccaaagggtttaaacaagctcctttatactcaaattcagtcctgcaaaagtcacttaggtattagaagtccctgccttggagtgagatatcggtgagtttaaagccaaataactaattggaaggctttgggtaggaggtttaacttccttgaaccttagcaaaaataaagatgttggtaataataaaatagtctctttttattctaattattattattaattatacaatcatataataattgtataattaatagtcaattattataattatataatgaatgttattattattttacttattcactttacatacttttcactgccccctcctagtcaccccctcccacaattcttcccccattcactgtccccttctcatctgagcaggtgggggccccctgggtaccccctcaccttgtcacatgaagtctctgtgaggctcaggctcatccctctcccactgnnnnnnnnnnnnnnnnnnnnnnnnnnnnnnnnnnnnnnnnnnnnnnnnnnnnnnnnnnnnnnnnnnnnnnnnnnnnnnnnnnnnnnnnnnnnnnnnnnnnnnnnnnnnnnnnnnnnnnnnnnnnnnnnnnnnnnnnnnnnnnnnnnnnnnnnnnnnnnnnnnnnnnnnnnnnnnnnnnnnnnnnnnnnnnnnnnnnnnnnnnnnnnnnnnnnnnnnnnnnnnnnnnnnnnnnnnnnnnnnnnnnnnnnnnnnnnnnnnnnnnnnnnnnnnnnnnnnnnnnnnnnnnnnnnnnnnnnnnnnnnnnnnnnnnnnnnnnnngctcatcctctcccactgaggccagacaaagcagcccagcttaaaaaaaaaatcccgtatgtaggcaatggcttttggggtagtctctcccgcaagagttgttttggggtagttgttcagaacccacatgaagaccaagctgcacatctgctacatatgtgcagggaggcctaggtccagcctgtgtgtgttctttggttggtggttcagtctctgagaactccagtagtctcacaaaggaccacaaatgatgtagtcaagggtcctgtgtgtggtcagggctaaatgaaagagtagatgctggtaccaacatgagcaataggaacttttcccgacattctgagagactggccctagcccacacctggcaacatgggagccagattcctcttgtctgcttagcttgcccaacctccagctgaggccactgaccgtgaaagtctcacatggtttcaaatgtctgaggtttcgttgctcttccaggacttctgtctgagtcttatgacagctgtgatgatgatggtgatgatgatggtggtggtgatggtggtgatggtggtggtggtagtgatggtggtggtggtggtggtggtggttggtggtgatggtggcggtggctgtggctgtgactgtggtggtggtagatgctggtgtctgtatgtgccttcaccagtggttgtaacgtttgttggccctcacagctaccctcttaggcgttctatataagatttagacttttcttcaagataaagaaaccaaggctgggaggaaacaatacccaagtagggcctagcagagtcgggtgctgaggtcactttgtctcctttgggaaccaagatctttgaatgtcagaggccatgttcctaggcaatatctagaaaatactccctaggcccccagctaccagtgctctgtatagtgtctcccagtgtctcccagttgaccagtgactagatcctttcttttccaaaagaaccagattgggtgtggctttttgtaccaccatccccagtcctctgactgtcccctctgagggctgttgctgacacaagggggtacagtgaacagattttcccccatgacgcctttctcccaggtactcaggaagtaaagaatccaaatctgagatgccagagatgggccggcaaacacctcgcagcccatggtgggcagcactgactggcagtgtccctccgagcacctggtgttattttggaacacttcaaaggacactgggagcacatcctagggcctccctcgacctgcaaatgccttttccagatattgcttctttggtctttataatggtcaggcctggctaccagggtgccagcgagctggcctggcttcccagaaaggaggatgaaagggatgcaggagcccagcagtttccatggaaacggctcgaggtggtggtgagaatagagtccagaggaacccagagatgggaacaggacttttgagtaacccagtcttaagcttggaatctttggggaaaaaaacaaaaacaaaaacaaaacaaaacaaaacaaacaaacaaaaaacaaaaccatctccctgtgcacaagggacctcggtcagagcatagtgacacatgtcagaagagcagggatgggaggaggtcggtgattgttaagtgacctcctgttacaaaatgcagacacacaggggtcaggggctcagggtcctgaatcacactcctgtcttgactcctggatgccaacagcactgtcaggtgccagccgtgcgaccccaggtgaggtggccacactctcagccctggtaaagccttggaaggtgttaggagttttaggggaggtaacatgtaggatgaaccttgcatgacctgggcatgataagcagatgctattgcaagtaggaaaactgaggcaagcaacagagagtctcatctaaagggcacagttatccccaccagtccaggtcaccgctttggtgaagatatcaagtcccaaagtggacagagctgcagggactgcatcttgatttgctggttggcaggaaactgggaagtctggaattgcagcagccatcttgattatccaagggaagacgctagagtggccgtgagtgggagggagggagggagagagagagagagagagagagagagagagagagagagagagagagagagaagacannnnnnnnnnnnnnnnnnnnnnnnnnnnnnnnnnnnnnnnnnnnnnnnnnnnnnnnnnnnnnnnnnnnnnnnnnnnnnnnnnnnnnnnnnnnnnnnnnnnnnnnnnnnnnnnnnnnnnnnnnnnnnnnnnnnnnnnnnnnnnnnnnnnnnnnnnnnnnnnnnnnnnnnnnnnnnnnnnnnnnnnnnnnnnnnnnnnnnnnnnnnnnnnnnnnnnnnnnnnnnnnnnnnnnnnnnnnnnnnnnnnnnnnnnnnnnnnnnnnnnnnnnnnnnnnnnnnnnnnnnnnnnnnnnnnnnnnnnnnnnnnnnnnnnnnnnnnnnnnnnnnnnnnnnnnnnnnnnnnnnnnnnnnnnnnnnnnnnnnnnnnnnnnnnnnnnnnnnnnnnnnnnnnnnnnnnnnnnnnnnnnnnnnnnnnnnnnnnnnnnnnnnnnnnnnnnnnnnnnnnnnnnnnnnnnnnncccttcacagacctacttttcccttcagtaaggaacgcctgttctcacaacctctcctgtcacagacaccaacctcaacacccacagcttccatttccccaatagatgggacctcttggtttcctaagtccaaattccccaggggtgaaccagctgggtggagctcacctttctgtgggagccatccatgtgctgaacagtccaacaggcagtggggcaagctcactggaaacgcaggtcaaaactactctgccacaggatgccaagtataaaagcagaggcaggggcatgaatacagggattggcagggttttgtttggttgtttgtttggttttggttttggttttttaaggatggggcatggctcagccgttgagagcacttgttgctctttcagagactggttctgagggttgaatgagtttatgttcctgcccttcacgcagcctgtgattgtgacctctggtgaaccgggcaaggattctttggtccaggggctggagagatggctcagtggttaagagggcttgctgctcttgcagaggacttgagttcagttcccagcacccatgtgggtgggtcacaagttcctgtaatatcagctgcaggggagccaacgccctcttgtggcctctgtgggcactgtgctcacatgcacatactttatacagacatgcagacatacaaataaatcataaaaaataaatgtaaagggtcagattatacatacatatattcatatatatctatacatatacatacatatatgcatatatatatggcttttaaaatatagggattttgtcactgtagcacaaaaaatggccataggcaaatgagtaaactaagaacaccagtctgtattaataatgctttctcgccaccatgttgtgatctgtatttggcttgcaggttacagtcagctgacactgaatctcctaagggaattttggtccccagtaatctctccaagcctcctcttcctccaggcaggcagcactaggagaagacacctgggagaaccattgtcctcccagggcaatgtgggtgtctacagagagcccagcgtagtgaccagcatgaagagagcaggagagcttcccgctctttcctccaggcaggatctcagcactgctggattccatgtccactgacttaactcatcagtctgagagcctccctgtctcccttggcctgtagctgatagcttctctgcagatcaggagacagggtcagtgcactagtgtggctgccttggctctgcttgggggacccggcagggagcacctggcttgatttgcgaacaaatttgttccacttcctgccagaatggaacttcctggtagctggaaatttggacctgtatactcaggatagaaaaaaaaaagtgtccctagaggggcagtgtcccacttccagaattctccaggaagcaatagggatactagaacgagacactaaaagatgagagctatgttttattcattccatgaattcatttaagattttattagctcaggctatacaaaaaaataatatttagttaccatctacattgtgccaggcaatatactagaattttgaggtttaatttaggtcaatgaaacagaaactgatgttcccttcaggatgctaaagtccagtgatcccatcacttgagaggctgagataggagaattaccagttcaaggccagcctggactaaaaagtgcaacactacctttatttgtttacaaataaacagatgggagtccaatgggggagacactgaccaaaccagactactgaaccgaatggtgcacagcgggattttacctcagttcaaatctacaagcttccctgagtgtaaattaactagaagggaggggcatgagaattctgggggtttgaacctggaaacagaggccccaggcagggacagataaaggtgagtcagagggactggactgctgtatggcacagagtatgtggcatgtcccaaccctagagagggtgaccccagagagagaggtagggccagattctaggggactgaattgtccaagggttttctgtcaggaaccacccggcagttcccttcataaaggctccctctgcataaatgtaacctacagatgacccctttctgctgtcttggggagcagctatgctttggacttggacagttgctggtgttggctgaagaagtcaggatctgtttagggagcaaatgggaactagctgagcctggcattgctggcagcagtgacacacacctttaatcccagccaccacgaggcagagacaggtgggtcttttagctcaggctgtaagtttgaggctagcctggtctacagagcaagcaaatgggaaccagcactgaactggacatcagaggctggggagaaggaaatgcccccatcactattgggtagccctatttgggaggaggagccccagtcacactgaatgggttgtttgagttcatgctgaatatacctcgctatggactaaacgttggtgacccttttcaaacttttttttgtttgtttgtttttgttttgttttgttttcgagacagggtttctctgtatagccctggctgtcctggaactcactttgtagaccaggctggcctcaaactcagaaatccacctgcctctgcctcccgagtgctgggattaaaggcgtgcgccaccacgcccggctccttttcaaacttttacattgcgcttaatcgctgccagcttcctgattggaggttgggactttggaaggtgatgaggtcacgaaggtggaacccctgtaagggggttaatgttctcgtaagataatgtgagtgcacagacctctctttctcctctgccacgcgaggacacagagtgttgttgcaaaccaagacggaggttcccagtagactcatccagtgacacattgatcttaaacttcctagtctccagaatggggagagatacatttctgttgtttgatcaatccaaacacgacaaccacacatgtgtttttgatgaagatgttgtctaatagaaagggcgagccacgcaggaagtcttacaggttcagagcttgggggcgggttcttggtgtgagaaacaggtttagaaatccaaaaccttgaggatgtggccaggtatactgggactaccctctcacccggggggggggggttgctttttcctctttgaggtccctctagtggtctcccctcctttggaagaacagagactgctccagggtctctgacctcaccaggggagagaggagtttttcttaaggtgagtaagttgcccctgccctggtagggtgatgaccccggagggaatcagacctatgagaaaacagaggaatctgtttccttgtgcaccagacacttttaagagcacgctgtgtcctggtcttagacccctccttatctacaacagagggaaggaccgtgtgtgtgtgtgtgtgtgtgtgtgtgtgtgtgtgtgtgtgtgtacgcgcgcgcgtgccttactctttgccctttccaggttctcagcactttgtagcccatctgtgcttagggaataaccttgaacaaatggagggtggagaatgaggaaggaggttacagcatgcggggccggggctggggtggtgtgcgggagtgcagggtgaaagctattgaaacgacctctttcgcggggacccagccagcttgtcttctggccaacaagggctgggcatagagcctgcctgggctgcctcaggagggcagctgctcaccctgctgggggccaaagctccggctggtgaggaggaagcgcctggccttctctctgccctcattcatgatccccgggcctggcgtggggctctgtactgccttcccgagtgcgtcattggggatcccctcccagacagactccaggaagggggtgggggtggggtgtgcaggccccgacttggaagagttcgaactgggtgcttcctgtcctcttcagatctgctgatggtggtcagatacatgaatcagaaacgcgagcaatgagggcgcaggaagacaagatctagaaggaagaagagaaagagggaagagatggctacatgccttgtagtggttgaaatcagtcagtgctgaccctgccttgtgtatcccctgcttcccgcagatgcctgtggcatcctgcccgggctcttcaaaggctcccagcactccccagctgcggtgcatgctgggtgttgaggcttgcagctgtaccattctctagggaactgtcacgtagcccaaaatgctcttcccaccaccacccatgtgggaaaagcccacagcgaatgactgacagatctgagaggttaagggttaaccccttgtctcatgaggcagagtctccattgggatcagggaaagaccagacttcctcttgtccaccccccccccacccccccaccccccccaaaccgtccatcatcctcttcctccttctaactatctctgggagcctgacacaagagatcctgtcttaggctctgctgttagaggtgactaagatctcttacctctcattagagcccagcccttcagactgggacctttgtttctggggcagtcagaatctctctctctctctctctctctctctctctctctcacacacacacacacacacacacacacacacacacacacacgttctcatggcagacaggcagccctagctggttgcttgtgaatggcaggcacaccagcaaagcttgtcaccacccctgtttctcggctgtacttacctagacctgggtcctcgctctcagagtttctatttcttcatcttcagcacatcagaaaaaacaaaaaacaaaaaaggtccttgtctgtacttgcagggaccttttgagacagggagagacagggtagtgtggaaggcagcagagaaagcagccttagagccatgcagacctgcgtgttctgctcagtggcctcaagtgtcaccagctcctccgctcacagcgttcgcatgcctaagtctgaggtgggtgatggcactgtaggtgggtgatggcactgtagtagttaatgccaggccttgcttggcgaatggcggctatggcaagtatacatagtacctgggaaagactaagtacctggtacgatgtgagtgttgttcagtttattaatggctgttatgtctaagtcagtggtaatgataatgaataccctggtgatatgggagaggtaccttggaagcaggacagatggaccccataggccaccgtgtgccaggtatggactggggaagtgcagacaggtagaagccacctgggcttgcttctcagccacctggtgtgaaccctcagtgttctgcagcagtggccttctgcctgcagtgactgtttgcacagcagcgcatctgtcaccctgtcaccacctccgccctgggaagcagatccccagggaccgtgaacaaagagcaccccaggagaagcccggcctggggaatgggtgatcgcaaatgagcttcggagggtctccaaccctttccagatgttctccagagcatcagactgaggactggctcctaccccctgctattctccccacacccatctcttttcaatctgtctccgtgtttgggagtttcttaacacccagctaatgcagcgggaagaatctgactaataaattcacacagaggtgttggtgacttaatgcatcgcgttgcatcgcaccctctttctcccaggaggttggactaaaggaatgaggctttgagtggcagagcttgaaaacctgtagagtgtgtgtgtgtgtgtgtgtgtgtgtgtgtgtgtgtgtgtgatagtctcaaaggttagaggctagattcttctgggcctaaaagacaaataggttaggtttttattgttgttgttgttgtttatcgttttttgaaacagaatttctctgtgtagccctagctgttctagaactcactctgtagacaaggctggccttggactctagatcctcctatctctgtcccctgagtgctgggattaaagttgagtgtcaccactgccgggtgacagagaggttctttggggacccaggcacccaggacagattgatgtaaactcaagacccctctctgtatcatcaggcttcttggagaaaccagattgtgctggagggatgtgggggttggtgaccaagtcacagcaataaggtgccactgtctgtatagccaatacacaggaggtcagcccaccccttgcccttggccttgaggcctggtggcagtcgtcgttgtgcttctagtggctttgccttgtcttgcaggtctcaggtgtgctgcttgactttgggcaacagtcccaggttgttattttttttttctcccaagtctggggttgatgctcagtcttagatggtcagcctttccgaccccagttggttgggcagatgcccacctctggtctgtactccccaagtggattccaaccaaaactagggtggggctttacacaacgccaacccaactgcagaggcccctgtggaaaattggcactcctttctctgaagcctgttcttgaccaggttccccttcctcaggcgtcccctggcagagtcttagcgagtacttcctgtgaggttggtacccagcgcctggccagcatcatcccacttacttctcagatgcaacatgagcatctcctacttcccacttctaggaggatggcagggagcgtacacagcaagacactaaagtgcttggctccctgactccttcctcatgagcttcattcatgagaacagctacaaacattcagagcaaatgccatgtgagttttgcccaggtcctctccagaccccgccatggcccagatttgtgagttttgatcttctaacgtatactgctacctccttcccagactgcctgagtctcttcagagatgtggtgatggttcttgggggtcagactggagagtttaagagcatgagaccatcagcttgcttggcctactttctttgtctgcttccctctctcccttacttgtttccttgataagttgcttgcacccaagtcatcatctcaggttctgcttctggaagaatctgacctaaggtgggttatttaggctttctgtcaagggccagataatcaacatcacaggatcgatgggccatattgtggtctctgtcagaatgacccagttctgccactgtcgattaaagtggaagctgtgatgtgaatgaatgtgcatagattttttttttcaataaaactttattcgtagaaacacgacgagggccagatttagccttcagctggagacaatagccttttgtagaagcctgctgctcgaatacacccctctgctcacatatgaggagacggaggtatcgaaaggccacacactcatgagtggcaagaccggcagctttgaagccaccatactgaaatgtcccttgcaagaagaggtaaacctctgtccagtcaggcccagtcaatggttctgggtgtcaaagaaggggagctgtgttggttaactttcctcatcattgtgatcacatacttggcaggcagcagcttaagagagaaagggtttatttggactgtttgagggtatccagtccatactggcagggatggctggttacattgtatctgcagtcaggaggcagaacgtgctgtagtgaaacttcaagacatacgtatctccagtggactagttccttctgctgggtcaaaccacaaggcccacccatagctggagcaccaagtgctggaactttggggaaatattttacattagaatcacaacaggggaagtgttctagctgattcatccccacccccaattttcagaaagaaagattgcatagagatgggtgatgggcagcttcctctaaagttctggatggttccgtgctaggagacctggaaagattctaaaaacagcaccaggtcctttgacaagtgtggtgctgattacccccatgctttggtaccctggtcaatgttctgctttcgtacacaaagagtccccatcacccccagatctccatatgaagtctgtgttggaacaggagggaggcatcagtgggccttgaatttcccaagcttgggacagggagctgccctggtatagcctccaacctaaacttgacttggatggggctgaaaaacaaaacctacctttctacccatgtcgagggactaaggaacccaggccccctccaaatccagtgacccactaaccttggggctttctggccaggtctgtgtgctcacacatagaaacacacattcaggtcttgacataaatcctttctaatcattgtagtaaatgttattaaacaacaaaagcttctcgtgatctttagccacatttctgtcctccatcctcctccttaattttcttcactctgtgcatatctgcatatctatggtcatatgaatttgctaaggttcaatgacatcggtggacggtcttcccatgcctggtcatactgtccttatgagggctttttaaaagcgctagacaatctgcgtttctgactttctctcttctgccagtctcctgtcacgagggagaagctattgtgtctattattttcaggcacgggccatttgcacccatttctaatatgaacagagaagctgtttctaccccagctcctttacatttttctcctgtggaatgtgggtgtggggtaagcttggggaagtcagaagtatctgcagccgctctacagaactctcttaagacactgtaaggaagcaagtgtggatggacgcatgttcacagtcagtggcttggatcccagacactggatgtctcatagaaagtctgtgatgtgagatgcaacaaatggtatgataatgacatgactccctgtcccctcactgacccggtcccctccctgttctgcccttgttcttccttcacagcctcactcacggaccataccagtggtaagcccatcactcgacctttaccctacttataagtggaaagtttttgtaatgaatgagccttgcatgagaagctgaaagcgtccagtctcagcacccagaggcctcctccccagtctggtgcctctgcagcccgcacattgcctgctctcatctttttttattaagttgctttctaattctgcttcctaatcagcctccttgactaaatacattggtgaccacagggacttggcagtctatcagggcctcgcttggcacagcgagaagggcttgctattgtccggtgggaggatcaacggtggtacatgggggactgtgagcatcggtgtgaacatcttctgggcagctcgtctgttcatcgttacctggtaccttgctgccaggatctaagctccattctccggccaggtcctgtggatggcttctggacaaagcagcctttgtgtccatggaagctgcatctctgtggttcagaatttcaattggacagtggctgccatggcaactaatacagtttataagttgggggactgagcccaggctgggccaggtacatttttaagaggctcttttctgattctgcaggttcccggagcttaccagagatggctaactttgcccaaggttccccccagcccacaccagcactgggtgcactctaatctaggaagggattaaggctcttcctggtcatatctccagcttcccctcttagattctaagtgattcaggctcagacaaaggaggccgaggttttctttggtgtgccgaggagataagattgaagctaaagcagagagtggaaaatcagccctgcttttgacatccgttcataaaatttccaaatagccatccagtctcaccctctggagctctgtggaggacagttttggtttttgcttcgcattgcttacaaagaactatatacaaacgtacagttgttcaggttgtgcactgtctaagtccatgcagggcacacatgcacagagcttcccggaattacacaccacaggaaatggataacactcccaacttctcactcaaaaacccgctggtcttagtgaacaaaagagactggtggtatccatgaaaggacgggtgaatgttgattaggactgatcagtctaaataaagcttccttgggctgttggagggagacgcagcacctgtataaaagttatcggttcactggaaagagcatcttactcacggctccctgggccaagtctgggaaagggcaaggggtgtggccaaaagtagtgggtgtggccaaacgccttagctgccctgagagaaagtcactgaagcctccttggccctggtgaagtcagggctgtgcatctggtgtcagagccagttggagagctattgaccctgaacaacctgtggtcaggacgcgccgcgcttggcgagacagcagtgcacctcgcttagcagccttctatgagggcaggaacgagaaggacgggtgatggttgagtccgaggaggtgataacaaacaccagattatgtatattcggaagcctcgatgctccttggatgctacagtcacattgcagggaagtggagtttggatgtccttatttccaccaagatttagcgtcttttctctggtgtggtgagggatcagaatagagattaagttgtattaaaaaaaaaaataaggtcatgtttcttgtagctgtgtatcttggaggcaagacttattcccacaacaaattgctttaagagtctccaaaaagaaaacagattgagtgttgttggtttatgttgtttgagccatcagggatgctacccctgagagctttgcaaaaaatcccgggtggatggctctgctttctgtcacttctgtcacgttttcgctcctgtgcacagcctgagccggacttcatccacacttgactgcagcttagccgaatgcttcttccgcttgtctatgggattcttcttccagactcaagagaaatcagagttctcagggcagtcctgggccttcggctggatgggttgaggctatgttagctttctgtcactgggacaaaatacttgaggaaaatcagctcagaaggatggaggatttatcaaccattgctttcggtttcagtccatgtgtgtctagccctgttgctttgggcctgtggagacccaggatgccagggcaaatgcgcatggcagagggattatttcatggtggccaggtctggatagagggaaggagggccagaaaggagagggctggatggagggatgagagagggagaatnnnnnnnnnnnnnnnnnnnnnnnnnnnnnnnnnnnnnnnnnnnnnnnnnnnnnnnnnnnnnnnnnnnnnnnnnnnnnnnnnnnnnnnnnnnnnnnnnnnnnnnnnnnnnnnnnnnnnnnnnnnnnnnnnnnnnnnnnnnnnnnnnnnnnnnnnnnnnnnnnnnnnnnnnnnnnnnnnnnnnnnnnnnnnnnnnnnnnnnnnnnnnnnnnnnnnnnnnnnnnnnnnnnnnnnnnnnnnnnnnnnnnnnnnnnnnnnnnnnnnnnnnnnnnnnnnnnnnnnnnnnnnnnnnnnnnnnnnnnnnnnnnnnnnnnnnnnnnnnnnnnnnnnnnnnnnnnnnnnnnnnnnnnnnnnnnnnnnnnnnnnnnnnnnnnnnnnnnnnnnnnnnttggagagaaatgtggggtgggggtggggagacagggacagctgtggacttctgattgcctcgtctgcagatctgactctgcagttgtctaaatgtttgacttgagtacaacacaatttactcaaaaaatgagaataattcagggaaacaggagagacatatgacaccggggaatgcccttgtgtgccaagttgggaacactaaacaagatgatttcaaatgaggttttttaaaaaacacagtcatttaggggttggctcacaaacaagtaaagggtgtgctgtgtcaacacaaggaacagaaaccacatgactctacccggaagtgcacatctgcacatctgcaactccagtgcccagaaaggggtcctgtcaacaagctgcctagttagcctggtgtatctgtataactagcatcatgcccacatgcacacgtacatgcttgtgcacactggggaacacatgaacacacaccacaaaggcacatgaactccccgccccacacagcaatttaaactgcacacttgtcgtacaatatattccaagaacaaaataactaaagccaaactgttttcagaaaaaaaaaaagaaataacattaatatttctactagtcattttctttaagaataacaaaatatctgaaactggagactgtcaacagtcacacgggaacttctgggagacaaaccacacctaaacacagaataattttattattttacacatatcacatgaacatgtacacacccacacatgtatatgcatacacagagcagatattgggaaggagagagagagagggagagagagagggagagagagagagaagattgtacctccagaaaggcttagaagtaatgaacagctccatagcaacaaggagcctggaattcagtttatatcctctaagcaccgttcccccacgaaggtctcatttccactaagcggaatgtgtgtagctcatttccatcctgatctgaatgaacaactataaagagctgtttatgaaatgacagggagacttggaagatcagtgggatggcagggggatgatggtgaccagattttgactgtgattttttttttttttttggagacagggtttctctgtgtagctctggctgtcctggaactcactctgtggaccaggctggcctcgaactcagaaatccacctgcctctgcctcctgagtgctgggatttgactgtgatttaaaggtgcattatgtgtttaagatacacgctgcagtcttctcttcaaaatggtccagttggaaggggaccacattgaatgaacacgggaggaaaagaagaccgcgatgccagtcagcattgaaactgggtaatgctaacacaggtgttgcaccatcttctgtagattagcatagggttgaaaacgtccatcacaatatttttaactagaatgaaaaggaagagacagggattaagaggcactccgtgggtctccctggcggaaggaagaagcccaggcagttccacaaagaacagccatctccctccaccccaagggtcacgatatccacaaggcagagaaacacaagacctaggaagtgtttcaaaaactgtggcattgagttggagaatttattcccaaacagctgactgagctgggatggtggaagggcagcttgagcctgacgtggctgtgtggaggaggaagtgggtcacctgtgggctctcagtccccctcgatcctggccatggcttttaaagggagtggctccagctccccttgaaggtgggtcaggacttagagggtttcaaccatgtaggcatgggtgaagtcagtctctgtaggcctttatgaaatttcaagcctaaaacattctggaattttccatctgtgagagaatctctctctctctctctctctctctctctctctatcnnnnnnnnnnnnnnnnnnnnnnnnnnnnnnnnnnnnnnnnnnnnnnnnnnnnnnnnnnnnnnnnnnnnnnnnnnnnnnnnnnnnnnnnnnnnnnnnnnnnctctctctctctccctctctctctctctcattgctggcagtccattctacccaagactcaccttgaacttcaatccttcctctgtcttctgagtcctgagatgacaggcaggtaccaccacacccagtttatgagttagcagtgatagaacccagggcttggtagacaccagataagcactcaatcaactgaactgtatgtccagcctacagatgtccttgacaatgcagcattgaccgaaaagagtcaactctgacaaaatacagactatattggagcgtattgcacggactataaaagcagcatagtgtaatgggataaggaagtttcatagtggcttggcagtgaccgagggacaaaggagctaagatctaagatctcacagaaccctggagtgctggcatggtgacagttgcatggagtttgctcttcggtttacttagccacacacttatgtcttaaggatgtcttcttattttaagtattttattgtgtattagtgttttgcctgcatgtatgcctgtgtaccacgtttgtgcctggtgccctcggaggtcaaagagggtcccctggaactgaagttgcagctgactgagctgctgtataggtgctgggttctctgtctgagcagtgaatgctgttaaccaccaggccatctctccagccctgaaatgcctcttttgaagggagagcaacactggggaaaggagacaagatcgtactctgtagccttggctagtctggaacttgctatgtagactaagccaggcttggaactcacagagctcctcctgcctctgcttctccttctcaggtagtagggttggcaccacaaccaggccttaagacgcctttttaaatgcattgtgctcagtggccaagagcactttcgacttttacagaagacctgggtctgagtccctgtacctgaatggcagccacaagcatctataactagggatcttctcacttctggcctccacagtcactgcatacatgaggtggacgagctacatttgggcaaaacacagacagaacatacaaattaaaaaaaatcatttaaagtgctatgcattttacgacataaatgtaaaatcatatactagaaaaaatgataaagtagattaaaaaaaccaacaacctcaaaatagaagatatccctctgtgactgcccctctaaaggtatctgttgtcaactctttggatgggatctttctgggagttaagcttagtggttaaggagatgatttttgagggctggagagatggctcagtggttaccctggctnnnnnnnnnnnnnnnnnnnnnnnnnnnnnnnnnnnnnnnnnnnnnnnnnnnnnnnnnnnnnnnnnnnnnnnnnnnnnnnnnnnnnnnnnnnnnnnnnnnnattcacaggcaggcacacacacacacacacacacacacacacacacacacacacacacacacgggtgctggggatttaaactcagtccgtctgcttgcagagcaaatgatcttatccactaagccatctatttccctaggtccgcagttgggatttgaagccaatccttttgtttcccacacccctgctccctagctgagaaagatgccctaggaggtaacctaataaagattataaactaagtggatggtggcagaagcgtcaggactcagggcccccgggcttctcatctctgagctaatgcctgggacatctgagttcaagcatgctgagctgttggatgccaaacagatcacccctaagtccctgcccccacgacacagctcccaacctggagatgtctaggctaatcaagacccaaggagggtttttcgaagccggtgaggcaggctgcagacatagcaggaggtaaggagcagcatcttttgatttgtgaactgatcccctttgatctgaagatcaataagagtaaatgagttacaggtgaggaagtctgtcccccgctactgctatggtggggctcttggatttgctgctgtcccccagcagcttgtgactccctctagaattctccctcagccacctccacagaaagcaggcatcaaggagattttctttctgtgagtgccaaacaagcttctctgtgtgtgtgtgtgtgtgtgtgtgtgtgtgtgtgtgtgtgtgtgtcccacgtgtgatttcaatagctcttccccactgtttggcagctgcagctgccctccagtctcagctgtaggaaggaggcctggatttaataggtctttactgcaaatgtcaactagaccctacgaaagctgcctggagacaccacagggagcaaagccaggctatttcaagactccacagcccagttcaagggatgagcactgacttggaccagctaagaatttagggtgattgtgtttctggggtgttatgcagctcctgggtttaacatttcttctgccagtctcccctgagcagacagaatcagagggcagcaaggaggggcttactagccacctgaagggttagggagtcccaggcccaaagctacaagggagttagtcatcactcttggggctccagattgagccagacctattggggaatagtttccagctgtgcacaaatgagtagaggggtttgtgtcctgcctcagcacagccaggttcccacatgaacaagcactgattgagtgaattgttgcctcagtaattagtaataggggcctgaagtcctgcagaggactctggaagtttggatttagccatccgctataaggaactgaggaccgctaaactcaaggagctagtccctaggtgtcccagtgtgcccccttctaagtgctaatccagaacactaacccttgccccactgtagatgggtttcatggattcgaatggcccagaccatgagatttagcatctgacaaatatgagttcaaacgctgcgacctgtcagctgtttgacctcatacaaatttcttcatcttaagaaagaaagaaagaaaggaaggaaggaaggaaggaagaaagaaagaaagaaagaaagagagaaaacaacaacttgttctgaaatagttgcctcccaatccccatatgtgtgcaggttattcacgccacagaatgcctgttaggtcagaggacaagtttccggagttggttctcttcttccactgtaggttctggggattgaacacaggtcagcaggcttgaccagcaagtgcttatagccacggagacatctcatttcttctgcttcatcttttaaattgcaattttctcattaatctctgtatatctgtctgtctgtgtatctgtctgtccctctctctgtgtataacttctgtaagaataaaaggcttatgggactcttggaatgactcaaaaataagaaatgaagaaaataaatgtttgttctcctgcctccatgaatgagtttgactaccttagcctgtctgacacatgatgctaaaatattctcttccatcctgcttgttggggagtacttagtaatattgatttactattcacaaattggttttatttagttttggggtctatgatcatcaaggtggtgagatttggtgctggaagacacaaagggtaaatcagttgtttagatactagaatgttctttcatggccaaccaccaaaaacccggcagaacactcaggactgaactaagttaggcatattatctcgtggcaaaaggatgggagtaggaacaatgggcttctcaggaagatggcagaaggaattatttgggggggggtgcatagtgatgtaggggtggtaaggaagtaaggcatatggacactgccaagtagtagtggtcactcatactgatgtctgtataagtttcctattgtagctataacagaatactataaggctagtggcttaaatagatgttgcagttctagaaaaaaaaagtccaaaatcattttgactgaactagaaaccaacatgtcagcagggagagtcccattggaaggccttgtccctttttgctcccagtctctagatgttgcttccaccccgtagctgtggcctcttcctttgtcttcaaaccagatacatgatactatatcttacaatgaccatggggccctcctaaataacttagggtcattcttccaccaaaattctttgacttagtttccatgaactaatttacctcctgtaataggaagtgtcatgcccacacattctcaggattgggaagggtgccaccatcttcaacatgagattagtccccattgcaagtgtacagttcttatgtagatgagcagagtaagccaccaagctgtgacttgtaaagcaacagcaaccactcacataaaccaggtcaccaatccttaacacgcatttgtcacagcaaatggatagataccgacagaatcttcttaactagagtcaatacactttctacctccttagtttctgcccgctgtccctgctcatctccagcaccacacccaggctaccatttgacagtagatgtcatgtctctttaggttcctcctgtgacagttgctcaggcttttaccccacttctgatgtccttgaaagtttggaaagtgctgatcaaacattttgtagaccgccagtcagttaggatctgtctgctgttttctcaggagaggtttatagactttgaaaaggaagaccctggagacacaatgcccttccctccctatcctctcaagactgcgttctgtcagcatgacctttatgctcatgtttcccaggtgtctgaggtacaacgtcgttgctttcacctcgtttgtgtgccgagatttctgagaggagtcccatcacacagcagctctccttaaagagtgtgcagcctctttcacggtagagaattcacataaagtagtattttatgtgaatactctggtcttgacctcttgaacttcttgtttctaccttctaagtgctggggtgtgggtgtgtgcttggcttaggtggattctacatgtatctaatagccttcacttacctctttggtcatttatttcagcatggactcaggggcattcattttatcctttggttatgatctaatgttacgttcttgaaaagttagctttgattggagtactctcctttggtccctatgtctctaaattgctttttacttaattatttttacataaaatatgctttgactatattctttcttctcctgtaatatagttacatcatttccccttcctttcctctcaccaaaccttacaaatccccctttactctctttcatgatctgtttttagttaattgttgatatatatattatatcatatccataaattatatgtatatttatatacatataaatatacaaacacaacctcagtccatacaatgttacttgtatgtatgtattttcaaggctggccatttggcactgcccctaggctttttttcccttttttgagatgtgtgcatatatgtgcttgtgtgtgcatgtatgcatgtttgtgcatttgcttagggctgctttactctctggcactgcagcgtatatgccttggaatcattgtgaatattctttgccttggccctcagaatagccattttcccaaggagccaggtcccgtttattggatgctgctatatacatactatggtggaggtgcagggtgggccaacttcctgtagtgcagaagttcaacttttgtcaccttaagtttatgatctcgtttgacctataagtagagatagatgtaagtggccattctgcatagggagggctcaggactggggaccacctctgagagtcatcatactagaaacccctttcgtatctgagactggccttgacctcttggccttcctgtttctaccttctaagtgctggggtgtgggtgtgtgcttggcttagtgacgtttttggagaagtttttctctaaagaggaacaaagacatgggcttgtagcttgacagggacataatcttcctttcctttctctctctctctctctctctctctctctctctctctctctctctctctctctccttccctccctccctctctctctttttctttctttccttcctttctttcctctttcctttattttctttctctttctttctttctttctttctttctttctttctttctttctttctttctacacaaggactcactatattgaccaagcaggtcttaaacttaaagaaaccagcctgcttctgcctgcttagtgctgagattaatggtgtgcatcaccatctctggcctctaattaatcttttgataatggagttgattacagtgcatttatatttatgggaataatccacagagaagtaaaaccactaatagtttagtgaaaagaggggataataatgacgatgtttattaagatatttctctttcagagacctgcacaccgtgtttattgcaatgccatcccacaatatcgaagttgaactagcatgcacatgaatgtaacatataaatatgtaaatatatatgtcttagctataaagaagaaaaaaatgtagttttctagaaagtggatggaagtgaagcgtatcattttagttgaaatgagccaaacaaaaataatacagtgtcacaagtgtcctcacatttgtaggatctgtttaagacgttctgggagtggaaaggaggaaagaagaggatctgcttgggggtgagaggagagaagggagtgaataggtgtggatacaccacagcatgttgtgtctgtgcatgacagtgccataatgaagctcattattccctgcagttaatatctactgacacgtcactgttttcccttacccatccctccacctgtccattcacccaaccaaccatccacccacccacctatctctccatccacccacccacctatctctccatccatccatccatccatccatccatccatccatccacctacccatcccagaagtacactgtgcacctggcaaatgcttagaacacaatgaaacacaaaggggacatggtgcatgcctatgcttgtgaactttagtctccttctcaatactctgaatacttttggatatagatggccgattctatgacaggaagtgacagtgacttattactgtcctctggtctcagacaatgtcttagctgggtttttgttgctgtgataaaacactgaccaaagcaattcggggaggagagggtttattttagcttacagcttgcagcccattattctattaggtgtgtgtgttggtgggggtgggagggaggtctaggcaggaactgatgcagaaaccatgaaggaatactgcttgatgctttattcaacctgctttcttatacaacccaggtccaggacatggctagtatcagctatcccatatcaatcattaatcaagaaaatgccctagaaacttgccaacagaccagtctgaggatggcactttctcagttgaggttccctctttcaagtttactccagtctatatcaagttgacaaaaaaccaaaaaaaaaaaaaaaaaaaaaaaaaaaaaccctaaccatcacagtagataataaaagtgaggcaagagatttcggtgtactaccgtgagagcaagaggagagtgtggttgactgtaacatctgaggtttacctaacagggacactccccaaactgaggcagcatcctgaaccacagagttggcaaagagcgcactttctcaaaaggaaaacagaacaatgaacacctgcacacgaaggctctcaattttaagtcgttggcaattgatttttataaaccctttccttgccttcctatatctctctcctccatttataagtctgatccaatttacgggtgtcggtttgcaaagtttgcttcatggtaatccattaagtaagcatggtggttctatgtttacctaattaataagtaaactactatttaacatcatctgcattgcgcttttaaaattttttgaattttgtatcccagtcctttaaatatcagtccctctgaaatatgctttgtggctattgactgtatctaaagaatatatgaatatgcacacatttagtctgagcccagtggatattaagctctaaatgctacctgtatttttaaaaggccacattgcttatgaaaacctcagaaagaaatggattagaggaaaactcttggggcttttggggttgactttgctatgagggttgaaaacagagggacaggatacacagctcagacacttggaactggggcatgcacaggccatcttgtctaggtcactgaaccgaatccagcccaaggcaaaactgcaacgtgtgagcatcagcatctgttcaggggcctgtgcgagggacttgggaactcagctggctggaagagccaggtttcctctgccattccgtagctgggctttaatgacatctcttaatactagtatcgtcatcccctggtcacatgatatagagacacaggcagagggagggaggctgtttagagggcccatgaggaagtaagtcatggcttgagtctttatgttagtttgtctatcatgttggatacaacactaggtgccaggtcttattatttatttgaaattatgattattgatgttattaatttgtgtatgtttctgttcatctgtaagtggcagtaccacagcacccacttggaggtcagagaaccactttggggtgtcagttcttttttcccattctaagactcaagaatgatcatgctagtgtggtgagtgctttttttaatctactggttcaccacctttctgatcctgggtgttttcttatttccatgagtcatgttatatatttgtgccagctacactattgtttatatttgagagagtgagcaaaaattaacttaataatctcatatgaaaagtgtgccccattattaatcaaaaacacacattacttaccataggatagaaagcaactataaggtgtaatataagttacataactattacagctttgtcaatggctaggtgtgggttacacttatcttgctcaccactgatggaagacatttagacctaaatctgtctgtagggaaaggagaggatttctagccctggattatacatgccgacaggtcaagctcactattctttctctggaaaactgttagctcgttaattgtccattgacttgaagttgaccaaatctctattctgagtctagtagtttcccaccctgggctttctttggggccctgagtattgaattttaattgtgctctcttgttgggccagtgatatttattccacacacactagaacaaacacatcagcgtcgtggctggcactatcccggcacattattggttcggtaattcagctgttaaatattttttaacactgtccttaaattttcaagttaaggtgcatgaatgtgatacaatggaagggacacaggtttctttgggggttggaggaccatgtcaggcagaaccaagggctctctggaacatagctatgattggacacttgtcaggaatggaccctctaggggccccctctttgctcctctgcttatgaaaagccagcagctctctccctgcgtcctgtttgctgcgcacggagctgtccgcagtgctgatttttgtctgcaagattgggttacgtaaggaannnnnnnnnnnnnnnnnnnnnnnnnnnnnnnnnnnnnnnnnnnnnnnnnnnnnnnnnnnnnnnnnnnnnnnnnnnnnnnnnnnnnnnnnnnnnnnnnnnnnnnnnnnnnnnnnnnnnnnnnnnnnnnnnnnnnnnnnnnnnnnnncttcttactgattttcctccttcctgcctcccaaacatttttgttgttgttgttataattctggatgtgtcaatgcagagatgcatccgacaaaagcagcctttactagccatcagcccttccctgcacacattgaatgcagtctctcttagttctggcacttcctagatatccccactctctagataaataacctgatggcaacgggagttgtttaactgattcaaggacacacagttaatgtagaggtggacttgaggtttaaatattctgacttcaagcaattttaaatgaaaatttttctttagatgtgttaagtctggaggctgactgatttttgatcaattctagagcatactgtgttcttgtcacagaaggtcttgcttttctgtatgaataacagcattcaccccaggactgtggctgctagtggacggtcacagattacaactgcatgtgatgttcagctcaggtgactggccaccactgctgaccgagccttgctgatagccagaaacacattcttctgagctccaagggccctactatctaaaaaaaaaagcttctctcacttttgagggatctttaagcacagaagaccctttattgcaggaatcctatcttctagatgcctctaggctggcttagaacagattacatccatagagaacatagccaactcaagagagcaggtagagaacagatgtgtttaaagggctcctgggtttgcagtcactgtaactacactctcaagccttcactggtgtttactatagctacacaaatgctcaacgttgcacgagtcccactatccccaaggtcacctggacttgtaatctaaacaactggcaggaatcagatgccacattcttcttttataataaactgtttactgcttcccagcctccgcctgacatttatagagttcctggttctaggagcaaaggaaaataagactcatctgctatttgaagctgatgcaacctcctccctaccagaactgccgattacagggctttgtacattgcctgaggcttcaccttcctttttttttgcaaactcctcctttctctccccagggataaacacaaattaatgtgtgtactggagaccggtgcttgatgccatcagcgtgctaaggaagccagtttgtgctgtatagaagcaagcgatggatttttctccccatggtttcttgacttcccatcaaacacgctaattagaacctcatgaacaagccatggccgagaagagagtggtttcagccagaaggagtgtaaagagctatactcaaccccacttggtttcagcttggtgtttcagcctttgcgcctcatcagcaagaatttgctctgccctcacaactccatcttacctatgacagaataaaaatcaatgcctctcgccagaactattcctgccactgtctttaagatggttgacaattagccaccatttttgtgtctggtcaattgacaacctatagaagtactaatatcacctttgattatcccttgactgctctcggtggagataaacacatttgttgaaataattttaaaaatgaagtggcaggtatccaagtgacagtttagtgctgagatgttaaataaaaccaagtccacctatgaacctacatagtgtaagatgaaaccttcccagggggaaattcatgagtccatataatctgtgtatcagggttaaagccatactggctggatagtttttgttaacttggcacaaactagagttgctctggaagaaggaaaattagttgatgaatcacctctaccagactgatctgtgggggccacttttattattgttgatttatgtaggaggacacaacccactgtggactgtgccaaccctgggaaggtgagcctgagctgtctaagtgacatagccatggtgagtgacctcataagcaatgttcttcaatgttccatagagtctatgatctctgcctcaagccccatgataaaccctttcctatccaagttagtaatggtcagtgtttatcactacagcaacaggaaaatcaccaccatcttttctgatggttccctttcctttatggtgcagtgtgactttgaagacagctaagcctaagaaagggttgtaaatgttacaatgacagaagtgtggaagatactttgacaatatgctctttagttccatgggcaatgacttgtctctagacctggcacatattaactgtgcatagcatgtcgcagaatgtcacaacctagacctctttctcctttcactattggaatcaggacctcaggatgctccccaagttttagaaatatacacaaacaacaaggttttataaatggttcttaggctaatggaatcctttcattaattaacttagtatctatattactgaagacctactgggtgccaggctctgagcccctgtctcttaaagtatcccttgctacattctccatatgggtaacacagaagacaaaaggctccagtagaaagatgcatggggtagtttcagagtggcgaatgccttgaaggcaagacaatgtatgtgagcagagtccctggccatgtagcctggctttgggtctgacttcttgctttcattaggaggaaatgatataaaatgtataaaaggaaaggtgggtttatttatagtatgggcccaagccaggtagagttagtgcctattgctaccttgcccaccattacacttcacacaaagaatagagcaaaggccaggaaaagcacacatgtagatttgtctgtgcacactccagggacatagctgagagcctgtccttgctccaggtgctgtggattctgggagtcgtcttcaagcttggaataatatttcttatagggagctagacctggaaaagaaatctgtttgtatatgaattaatcaatttacattttaaatagtaatgtctaggaactctgttaccatgggacagtggctctggggagaggaaggccccgagagtaagggagcatgtgtctgtgagggctgtttgaactgggcttcggcaagagggagacagacttgcaatattcaaggtttctgcctatctcaggatcaagtactccaaagtaggaataagtttctcatacttgaaggacaaacctggagagctggtggggctcacaatgagggagggtgaggcagaagggagatgcaaggtgggggagatgcgcagcattgtatcaagtacagttctgtaagtcacagcaggtgttttggagatgggggattccagttttactatatctatttgttttgtatgtaatttaaaatttaggtgggtagatgtatggataggtggatttatgtcatggagtgcatgtggtggtcagagttggttcttttctccttccaccacatgagatgcagggaggatcaaacccaggttgtcaggtttggtggaaggcacttttaccagctgaggcatcgtgtgtgtgtgtgtgtgtgtgtgtgtgtgtgtgtgtgtgtgtgtatacatatgtatatgtatattgtgcatcagaaaccattgagaagatttaagcagggaagaaagtgggatacttagttttaagggcatagtttacctgtctgagaaaaacagctcataggatggtgaggaggaaggaggcatggctcaagaagaggtttttgcagtgaccaaatggagcaaaaatttcaatctctttccaacaacaaatggattaagtacaattgagaaccataaaaagaagtgagcagagcttgtttctttcccaggctctgtttcaccccatttattgcgccattacatcctgctgtaatcatccgaggtacagtcaatcattcctcattgcatgtgacaggtgggaaagacgcagctgtaagaatcaaaggatactgcccacacccccatgcacatcaagcgacatcagaggacactgctcgtatccacacacagtgaatgacagagtagcaggcacaagcttaacactcaagccagtccaaaccagcaaaccacccagatcagtgctgttactggtagtgaggagctggggattctgtggctgaataggtgggttttgaacccaggaagacttcattccagccctagttcttgcttcagaaccctatgaccttgggcaagaggcctcagcaacttctcattgcctctgcctctgctctataaatagaggataataacaatagattctagttcccggggttgctgacttcacatatgcagtttagaacagtgctcatcacaggaagcattcagtaaatatctctatcaccaagagaatgggatatggcaaagaccgcgggcgcgtgaaatcttagcccagaacagaggctcgaaagaggtttgctgggctttatgttttacttgaagtcaaacgaatcccattcactcttattccaaacaagcctgcagcccccaagcgacccttctcttcagagtgcccaaggcatcgatgtttctccctgggatgttctggtgtaagcagagggctactgagtgtctgccactgttgcagcggggaaggcactaggaaaggaaccatggcataagtgagttcttggaaactgggacgagcgtcaggcggcctggggtagttagaagaggcccttccatcacatggaggagagctcaggagtgaaaatggaggaagaatatgaaaggggatgtcctggagatggaatcaccagggagttgtgaaccatgtgatgtggcgctgggatttgaacccagccctctggaattgcagcagttgctctcagccattgggccatctgtccagtgccacaatcctgaattatagaacggatggttgcagtgcccaagggaaaggaaaccaatggattttctaggtctcggggagaaaaggtgagggagagaggatgccgctgctctcctagggctgataattgagtcctgaaactgagtctgcagatgtctggaaagcccaggttcattgttttcagtggctcctcggcggctgtgctgtcacacgatggtcagcagagggcagtgtagccaatggcccactgtgagtgaggggctgtctgctcctcagccgagggtcctggaacgtttctggagcgtaaaactgtacctgtttgtgcacgttctgaggatagccccacctcttcatttttctttggagtcctgttcttttctgcctgtctccaatgtgttcctctttccttccacccattgttcgctctgtcgtgggccagcattcctcaccttttacctctgtaaagcatgtggacacccactgcctccttgggtcctctgaagtattttctgagagacaggtcaggctaaatatggattattgtgcagatcaagaaacaggcctaaagaggttcctggtctctcggccctgttctttgttccagtgtcattacaggctgactgccaagggttatagtgtttatcactgcaaagatggctctcccgaaccccagggtaccacacatccttttgagtcacaagaaaagcttccaaagcaataaacaggggagggacttcctcagatgcaagggctcagggttcctacacattttataagacccttggcccaaagtcatcctaaaagctaagccttagactctaagggctctgcatactcttaggagcagaaggaaacagatccgtctctgtgatttttaaggacagaagccaccagcgttcctggctcgggaccagttggctggactgtgctagcaaatactatatgcagtgttgaaatgttgggctgtgaggaaagttctctaaacttccatgaggggtgactgtggctctggatggatgactccaggggagtagaagagctcaccacaaactctgtaggcagtcatcagcactgctccaaacaggtggtttgccacactctcccctctgaccctgggctgactttgaattccctatatagctgaggaaaaccctgaacttcttgttttcctgcctctgtttaccaaatgctcagattacaggtgagcaccaccatcggaggtttgtcatgtgacccctactggctgggaactcacagggatccatctgcctctgcttcacaaaggctgggcttaaaggcgcatgcctcctatgcctagcttccatgtacctgtaccatgtacatgtatctgtcgtcagtggaagttcagtcctgactgcaggaggaggagaatcacttggggggtgggggtggggcagtttcctgagaccatcagaccaggaccagccactagattccagaatacatgagagcactcaactaagatcaacagaaacccatccctaacccgctgctgacctcaggaccacaaaaattcccaggagagaaattactaagctgacccttagcgaagcacgagcaatctcacttactaactaatgctgccgggaaggggcacttggtcatccttggcgagttgctaacaacttaaacacagactcactgagggatgaggcaggagcatggagggatgatttacaaagttactaactgtattgccaaattctaaaaataacagtggtaactttaagacttaaatctagcagttgacacatagtggttcagagaagacaccggagtaagtcagaccagttccaatgtcctattccatcccggatgggatttctgattctatttttgcactggtttccttttctgtaagatggggatagtgatgagcatcaaagtagcctaatcagtgtggggtgtgtcagtgtggtacctggtacatgatggcacagccaataagcaccaagcattatcagtcgctatcttagttacctttctattgtggtgacaaaacatcacgacaaagctaacttataaaagaaagtgttcagttgagcttatggttcctgagggttagagtccatgatgacagagcaaagccactatagcaggaacagctgagagcttgcatcttcatgcatgagtgaaagagagagagagagagagagagagagagagagagagagagagagagagagagagagagagagatctggaatagagtgagtctttttgaaaccttatagcccggtgcccaaagacattcctcccccaatgaggccacacctcttaatcctgcccaaatagttccaccaacttcagaccaagtattgaaccatgtggaactatggaggccattctcattccatcaaggactggagcaatgagtagccaaaggctatctctctatatgaccctgtggttgtcataggttggactggtactctacagtgtcacaattcatctaagattttgaaagtggaattataattaatacacatacatacatgcatgcatgtgcacacattttttgtagtacttgggatagaacttagggctttgcactattagacaaccattctggtactgagacatacctctatgccttttttattttgaaataaaatcttgctaagtttcctatgctggtcttgaactcacggtgaagctcaaacaggcttccaatatgtgatccttctgcctcagaatagtctcagattctcaagtagaaagaattacagagctgcacccaaatgattctttcttaaaagtaatatctacaatgcattgtaactcaaagtacctcctagggcaaactgcttggttaaagaatcttttggattatgagttataatttataattgtgagtaatgagctctagtgtactaaaatcaatgttattttctaaaagggaaactgccatttaggcaggggaatacatctttttctgagtgtaactattcactctgtcttttgttgaactaagaagcaaaacaattgtccaccatagccaaagtgagaaaaataagccactgccagcgtcctcttatgaaaaggtttatccaaacagaagctctggaaagacaagcagccgcagggtgcttacacttacacttgctggctcttaaactatacttaatagtgtttgtcctggacagggaagaaaggggtctggggagatggctctgttagtaaagtgtttgtcatataagcataaatgcctgagttcaattcatgggaacccacattaaaaagctagacacagtagcccttactgttgagatagagacaggaagagttatttgaataattgatctccagattcagtgatactctgtctcaggaaaaaaaaaatcaaccaaaccatgagatagagaaaatttgaggaagacaccagatatgtacctctggcctctgtatgcatgggcacacatgtgcatacacacatgaacacacgcacacatacacacacacacacacacacacacacacacacacacacacacacacagcactgtgatggagacagtgaggtggaaattctgctgagtttagagacgactgtcccatcaatgtctctctgagtagatttagactttgtgaacatccactaatcttgctgactcttgctgatttaattaaaaataagaatatacttgtcatgctgatatctagtatcatgtatgttaatttaaaaacattatatatatttcttttccccaaactgattcttgggttttctttcttgctttcccttggttatatcacaggaatatgtggtaaaggtttaatacctgagatttccatgttctatgttcatggaactctgcacacaggatggagggattcacagtccctgggtccactagagaactccacgtaggtccagattgtgggttctatttgcagaacagtagcacatttaccaactcccattttctaagtatggactattcccatctcctttcccacagcttgggctttgtgtctgtgacgaggacacttgtgtgtgtgcttcaaagaatttcagagaagagccagaaaacactgaccgtcaacacagaagcctcacctgttggtggcctgcagctcccctagcttccaaagggctgcaggaaaaaacaaacaaacaaacaaacaaacaaaacaaaaaaaaaacctgtgagcgcaccaaggttactgagagaggcttctcctctctccggctgatttgaggttctttggcctcacccttcccacagcgcagccccccaagacggacactgtgctttggcagttcatattcacctggggggggtaagctgggctgttagataccagcatctgatgtcacacacacacacacacacacacacacacacacacacacacacacaccagttatttgtggagagttccccctggattgtttggtatttggacattattggttgttaaatattatggatttcatccctggcttcagagtgacagaatcctactgcttttattgaatttctccaaacccaaggggaggaaccacagccaatctttctgtgtgtctcttgtctctcattttctctttctcatccagccatctccactcaccggtccgcagcggaagagggtggtttccccatagctcccaattaattttatttcaagccaatggcagagagcaatgcacgtctctgaactacaatttagagctcttgcaggggagagtctcacgagttagtgaagagtggtgtccgtctctggttcagccactatgtttagaaggttataggcacatgatgtaagtataaacacattcaacgtgaccctgtaaatgacaatgtgggcagttatttgagaagggtgctgttgtgggtggcttctgaaatccccctcccagcccccccccccccaggagagcttattcctggtgacatgcatcgaggccatcagctcttaaataagggctgggcttagagacttgcctctagtatatagatgggaataactggtgagatgacatctctaacgttaggttacaggactaggccctgcatcctattcacactcctcttggcttacctttgctggctctgacaaaggaagctatcacatgtgccccctggcaaaaatctgtatggcaaagatctgaggatggcttctgctcaaatgtcagcagggaactctccagtcaacacccaatcgaaagatcctgcaagtagatcctccccactcaagcccagagatgtctgcagccctctctggctccttgtttgtaacccttggagggaccttaaacagaggcagcctgccaagccatgtgttggtccctgagccacagaatctcctggaaggcagatgctgttttaagccactttgactcccatccttctacaagtttaaaggacgaagatttagggcaggtagttaattatgcagcccaagatggctagtgtaggatttctgcagtcgcaaaagccccgaggtctgagctgtcatcttgttcttactttgtaacaacatgccagcttgcaggagttacagaccctctgcaagtcatactgtcacctgtaagacagataatagtaacacatattgtttttttaaggctaaaggagatagtgtgagcccagagaatgcagttagcaaagctctacaaaatgactcaacagactaatattaattaattagctattataagttaacatttacagggtcaacgaggtttggttagatgcctgcctgacttttcaggaactggagggctgactcagtgattaaggacgtgtgctgatctagctcaggagctaagagtgggcactgatctagctggtggttaggagtgggcactgatctagctcaatggttgagagtgtgcactgatctagctcagcagttgagagtgtgcactgatctagctcaggggttgagagtgtgcactgatctagctcagcggttgagagtgtgtactgatccagctcagcagttgaacctgtgtactggtctggttcagtttccagcccccattctgtgtacagctcacagctctctgtaactccagctccagaatatccaacgccctcttctggcctcctcatgtacctgcatacccgtgcacatatacagaggcctacacacaaacacataaatacgccttaaagacataaaggaatcttaaagagccttcccatgtctgttaagcctgctcacatgggtcattggtaccctgacttcctcttagagacatctagagaacactatgccccttccagaaatgatctagaaaagaacataaaatatcaagtgatccacatgatgcaaatagctactaaactacacaacagtgaattattttcattttagatattatagtaaagcataatttttatatcacagagaagttgactaaaaacagaaccggtgctttcagactcaaaagctcaaaaatatatttgagttgatagaattgaacttgtttctgcagttcccttccacagccaattattctgtgggttgaaatgccagggcaccatgcaggtggcaatccatcacaaagacggaggccggagacggagctcaggagggtaatcagcagtgctttaaaggtctctgccttctgagggcacagcccgtgatgtcagcagttccatggaagcacaaacatgcagcgagcgtgtttgcactctcccccgggacaatgctttccttcctccaggagctgcgaatctccccagtggagggagatgtgcagacctcacctcacctcacctcacctcacctcacctcacctcacctcacctcacctcacctcacctcnnnnnnnnnnnnnnnnnnnnnnnnnnnnnnnnnnnnnnnnnnnnnnnnnnnnnnnnnnnnnnnnnnnnnnnnnnnnnnnnnnnnnnnnnnnnnnnnnnnntactttccagagccgtgactttattaaaagcatccccacatcttcccaccaccttacacacatatgtggctcagacacatccgtgtctcagtctacctgccccgcccgcttcttggttcatttatcccagtgagcaccttctttccttgatgaatggggacagcgtcttgagtattccacttttactctccaatgccaagcacaacacaagcctatttgggttaaggatgctggtactgtttgctgagaaaacagtagagaaaaagtcagaaaagcatgggtgagatacattactcttcatccaaaaaaaaaatccaaagcttgcttagcaagtcctgccattgtgtgtagttggggccaccacaatccatcttttcatccccttctcatgtccctaagaatgctagaagttgccatccatatatctgtgtatgtatttatgtatatgcatatatatagtcatataaaagtgatacattctaacaaattccattgttaagttatggcatccttgtgtgaacatcatgaagtacacttgtataagctatctacagtgttgctaaggatcccagtttcatttctgttgctgcgataaaatcccctgacagaaatcaatttaagggagaaagggcttatttagcttacaaattatagatcattgtccatcactgaggagcgtctgggaagcagaaaccgtgcaaaaacatgcttatgggctcagctgcaggccttggctagctttcttctacatcacaggaccacctaactacccagggattagaacctcccacagtgggccggctctcccgcatctattaacaatcatggcagtcctttgcagacatgcacaatcctgcaattgagactcctttgtctcatgacactaggacaagggaaaatctcaaactaggcattactagcgtcttagaggaggcatcgagggtaaagtaagccaaaagcctcagggtgtttgctgagctcttcccaaggttctgcccttgggctgtaagaggcagctataaagtaatctcccggcatcaaaatacccactggaaaggaataaaagtctgagccaaaggctggaaggtgcgaataagaattcactgtttatcccttgacggagtaaaaagaactgagcagcagtgctgttgggatgaaacacaagcaggatggacagtgtggtgctcaggcatgcattccacagggggaccaagtgaaacagcagactaaaaaacagagcagagcagaccaaaaaaagatggaagacaagaggagaaggagcccaaggagcctcggaagagtgctgccaggacttcagaggaaattgctaagaacatgagctcagtgagacaccgaaaacacaaggaagcaaaagcagaaaagttcagggatggatttcatgagccaaaaggtgaaaagaaaggcaggggcgttacagcagaagctgagcgatctcaccttgaacaacaaaaagagagcagaaagaatgaactggggatggcaggaggctttgaaacctcagattccactccaagtgatgtatttcctccatcgaggccatccagcctgagcctccccaaacagcatcaccaattgtggaccaagtattcaaatgcaggacactatgagggacaactctcattcaaactaccacagacccgatggaacatgggtcatgaatggatccacgcttttcttacacaaatgttttcttattcttgtggacttgtattaataacttcaggattgtgagaaagaaaattcatgtttttcttacatgcccccctctgctttccaccatgacttgaggcagtatgagaccctcaccaaaagcccggtaggtaccattaccacggccttagactgtaattactcagttccagctgttcctttatagcaacacagaccaagaaagtatcttaatgaagataccgagcaggaagttggatactacaagaagagactagaggttaaaagacagatccaagataacaacacactttgaggtcattgatgtgtggtttttaaggcttgtgaatggatgaggtctctcagggaaggcacagagaagagggctgtgctggctagtttgatgttaacttgacacaagctacagtcattttggaagaggggaccttaattgagaaaatttccccaccacattggcctgtagtacattttcttgattgatggtttgtgtgggaggggccaccagctcatggtggacagtgctgtatctggtggtactctaagaaagcaggatgagcaaaccagtaaaccgccctggtccacggtctctgccttggcttctgcctctggcttcttgccctatttaagttcctgccctgacttccttcagtgatggattgtgataagctgaaataaactcttttctctataaatagattttggtcatactgttttatcatagcagtaaaatccctaagacaagggccaaggaatgtgcactggtttactccaatactaagaaatcagaaccaggtatatggtatacctctatatccccaacactcagaaggctgaagcaggaggaacaagagtttgaaacaagcctgggctacctagcaagttttaggttagtctgggctgcatagagagagggaagaagactggactagagagtcagtgaggagggggaggaggaaaaagaggaggaggaggaaatacttagggctagtgtttgggactccaaagtgtgacacaagccaggagtggcttgtgacaagcgagagatcaaccgtatcaaatacaatggaaggatcaagggaagttgagtcccaaggctcacccactatacttagatgtgcagactccacggtgacagtaaacaatagaggtgtatagctgattggaggagccttcagagaaagagttagagaggaattggaacaacgtggagagatagaatttccaagaagttttgctgcaaacaagtaaagaagggtgaggaagctggctgaaatgctgaggtcaagctcctatctgccaatcctccttctgaaggaaaggtaaccttgagacaagtctcaacttctaggcttgtttccttgtcttccaaacaaggacaccagtgcttaaatccttccttcatttaacaaacatttattgattacttaccgtgcgccacaagccaggagtgcttagatcaatacccactgtgtccttccaaagcacacggtctccctgcagcctaatagatgggaaacaaagaatttgaatacttagagacaaatgccatgcacccactgtagggagaaagaggagtcacatctgaccgggtcagggtgggaatgtctcctcagcacgtggactcaccatgagtgagactaaaatcttggcaggcacaagatagatggcataggtaggagatagcaagggatcagagagagtggtagagagagaataaaaaatctgctagggctatgcaagacatctagcctactactctcctactctgcccttgacctgctccctagccaaccctgctgcttgctacgcccatatttgccttcacagtctttcccccaaagttccctaggcagacaccatctatcagtgggacttggcctctgaagtgaaaccaattgcttgtctattgtcagcatatattctagcaatgcgctaaccacaaaacacttcccccagatctgatgtagtattaatgttactcattaatgacatgaagtacaaacccagttcaagacagacggttcggaatttgaagtgtattttggtgaacattcacaaatgtagagtccattttaagagtcataagatctcttttttagttggatatgagacggatgcacattcctgaaaattattagtgtgtgtgtgtgtgtgtgtgtgtgtgtgtgtgtttgtgtgtgcatgtgtgtgcgtgcatgtgtgtgtgtggtttagctgaacaaagaagacatttctacaagggattggcgttcggatggatttaggcatggaggagatgctctttctgatcacatttcaaagctttaggaggtattttatatacagagtaaagagaaaaatataacactactgtatccactacccaaaatttctaagtattgacatttgctattggttgctattggggcttaataaaaggaataagacattacagatccaactgatgccctttgtccccttttctatgccccagtccctgaactttcccccaagacactcttctctcaagcttggtcgctgtcttcctcactcatgactgggtaacaagtctttttctatttggaccaaaacacactgaacagaattactttctgggcttttcaaatcaccttaactgataatacaaagcaaggctgcatttgtggctctcctccctcaatgctcagttggtgaatgccttcaaggtgataatatatttgttctgcatcttacagcttgtccagctgcccctgaaatcagtccaaactgttgaagacagcctacagatagagcagacagagtctcggtggcaggtacgaaaccatttggcctcaataatctcgctcctctcttctagctcctttgcttctccttcttttctcccctacctttcttcccttccctgctctactgatgatcatgaatgcatcaaggagaagcagcagagggcaaactctgcaaagggggtctgaatttaacactctagcttccaaatcttcctcctcctcctccctccccctcctcctcctagcattttctaggtattttctaggtagctagcgcatatcaagtaagcacttggtgttcctttgctaatcctaacaccaccttgtgggtctttccttgcccaaggttacaaagcaaggctgtggagagttcagtgcaggcactcagctgcaagggctggtgtgctccaccactcaccaagaggagtcattcatcccagtgggccatagtgttaagtgagctcttaacactacaactccccaaggccagtgctttaacaagttgggcattgaatccagttaaaaataaagcaccctgatgattcctaataataaataataataaagccatcgcttacaaattcacagggtggagaattagtttagctttctgacatgttatttaactatcttttaatttaccacttcctttgggaaatttgttggactctttcactattggccctaaatctttaagaacaaaaatggttactcctttttctcttgaggatttcctgttgtggcagagcgagtgtggaaatctaattcccatgatcctctgtatcctggctcctcactattttctctgattacaactcagtgaacaactgtacagagggcgagacttccggggggagggggggggaccgcggggggcggggaggaattgcagcatcgtgctagagcagaatttctcaacctgtggatcccgacccctctgagggtcatatgtcagatatcatgcatcttagatctttacattacagttcgcaacagtagcaaaattacagtaaaagagtagcaatgaactaattttatggttgtgggtcccacaacataaggaatggttttaaagtcttgtagcattggaaagttgggaaccactgcactagagggataaatattcctcccactggttctgcatggtctaggtcatttgccttacacacacacacacacacacacacacacacacacacatacacacacactcactcaaaataaaataaaaataaaaataatgctagttctattagattattacccctctcttatggccttattcaaccttaatccctgtctccaaaagaagtcacaagagttttaaggcttcaacatgcaaatttgttttgaggagacacaactcaatctataacaatgtaactgtatatctatatctatatctatatctatatatatatatatatatatatctaaatatatatatattgtttttcattttttatttttatcttttttctatgctggagaatgaaccacaaagttattttaattaaaagacgtatcttaggctagcacattattaatgacaatatcaaactcttgttttaaggttaatttaaaattattttaatgaaatttataacctacaaaatacatctcaacttttctttacttggtaagtaattcaacaccatttagtcagaacaagcatgaattgctgtgaatttttttttttctttttggtttttcgagacagggtttctttgtatagccctggctgtcctggaactcactttgtagaccaggctggccccgaacttcagaaatccttctgcctctgcctcccgagtgctgggattaaaggcgtgtgccaccatacctggctgaaatattttttaagaagacagttcatactgagttttagtcctaatatatgttaaaatgtagagtgaagtttaactatatgatatggtaataaaatagacaaaaattgctcttatgatcgatgtgtgcaatttttatatttatgcttaaaattaacttttttgtaatatttgtttctaaacagtatgcaaacagcttcaagatcctatttgcactgaatattacattgtagacattctacccaacgttacaggagccaagttggttattagttttactctaatttccttttgtgtgttacttttctttttaaaaaaaaaaattaattatttatttactttacatctggattgaagcttcccctcccttctctcctctcagtccctccttctcccctccctccatccaccccttctccctctctcctccgaaaagaggaggcctcccatggatagcaatcagccttggtatagcaaactgcagtaggactaggcgtgtctcttctattgaggctagacaaggcagtccagttaggggcaagggctccagaggcaggcagtgcagtcaaaggcagatgctgcagtaagtcagaggcaggcagtgtagtgagaggcaggcgtcatgtatccgcttcacacatctggatcactttgtctttcctaaaaccttttcaacagcccactctcttgcttttctaacacgcatgccattcatcttcctttaacaactattgccgctgccgatacacctttctgagtctgaatgggaatgatggagatggcttggcacagctggcagcaatttggattcaggcagactcaagttcacaccctgactctgctgcctggtgatgacataactttcagcgaattgtcagattgttctcagcctgcattctgttcctaaaacggaaacggtaagtgtatttatgtcatgtaattaagagaactaacagtgcaaaagccccacagttcttcagcaaaggttttatggtcaccgtttgtgtagtgaccattttacccagggaagactccctacatcctttgctgtttggagtgttcatgacagtatttataaacacggtaatttcatctaacagattacaaattcctcacatactcctgggttccacaaaagaacagcattcatatattgacattttaaactaatatttattatcaggaaggtggcaccttgtaggtcacccatgctctagtggatggtcctatgcacatactatctgctctaattggaatcagtgagctacaaaaaaaagaaagtaaagaacattgtatgaaatggggaggggggagttggaagaggaggagggtgatcaaaacatattgtacatatgtatgaaagtctcaaagaatcccatttagaaagcaacagagtctctccaacggctaaaatgaaaagacaatgccaaaaagttgcattatgggtaggactacaaaacggtggaacacttcagaaatctggggaagtcttaagaagttacacacactcagaactctggggaagatttaagaagttacacacacagcagctgcgattattctctcctcttggtcgctatgcctgctggatgactcagttcctccacatctaagtcacacaagaataatgaaaacatatgcttacaacaacatattagaaagtccccaaacaggtccattcgtaatatcaccagtctagaaactaaacagtcagccttcagtagaagaactgattaaagtcaacccacagaatgacaaaccccttgcaatataaattttaaagacacaagacaatacagatgaaaacattttaaataataaattgaacagggagaggctgagaagagtcaaagtgtaatgattgaattatgtgaaattctagaccagatcatctaaattagggtgatgggaaatacagtgatagctgcttcttgagggtggaagactaggaaggaacttaagggagcttttctaaaatattcagtaggtatttgcctgctccacaagaggaattcatgccttgtattagttatggcccaaacccataactaacaaatcgtgggctctaagggagagtccactgatttttttttttttctctaaatggtcaagttgccaaactgccttctgaatacggtgctcttccctcatctctgtcaaagttctgagaagtgactgacagctcagccatagacaggccatctacataacacctgctcagggaaggggagtgcagaagagtgggtgaaaagagtgggagagcgagaggatgagggaagtgctgtgaagcgctttcctctaaaaaggatggctgttacacttataaacgcacagcagctgtggctaccccacagctggggaggtggagacaggtggataccagtgactagctggacagtctaacctaactagagagtcccaggcctgagagtccatcctctggtatccctggctgacatggaactctctatgtagaccagagtgacttagaactcagagatctgtttccctctggctcatgagagctgggatcaaaggcttgtggcactacaccgggtggttttctttttccttggtttattaatatgtaaacacaccaagtgatgatacttccgtttctttaatttggttttgcactcaagttatccattgagcttcaattttaatgcagtctctcctaggaactagcatctatctatccagggtaaaccttcgggtaccaaagcccagttccgttgccatggcgacccgctgagacggacaagtttctccgcaccagagctcagctccaggagttgccaccctcccgagtgacgtcgatgcgcgtgacgataggcctcccggaaggcgcctgtgcagtgtggctgtcagagcctcgcagccggtgggggcgtggtctggaggaggatctggaactccagttgcgcgtgcgcaggtccgggcggtcttccaggcgctccctcctctttgtccgcgacccggttgccaagtacgcagaggagacgccacccccggaagctgttcccgggagcggaagtggcaggtggctcgttagagtgaggaccgcgtgtgcggtgctactctgctcctgctcgaggggctctggtgggcgtgggctgaaggaatgcggacccggcttctcggtgagtgacagttcccggacggttcgctgcgggcaaggggcggggctgctcaaatgagtgtttgagaggtggctgtcccaggacccagtgtgagcactgcacatgccccagtgtttttatttcctaggaaaagttggcgggaccattgctaacactccctatgctcacttagacctgacagctgttgagaacttaaaggctttggtgttggacttacaaattttataatcatttccttgtggctttggacaggaagcttcctgtcttccacttggagcctgcaaaataatacagttgatactcatcagcctcacatgcactttggaaacggcatgcatttagttgaaaaaaaattttatgcatttaattgaaattttttttgtttttaagtcgtacattgaaatgctagggtgaaattgaaatgcattattctgttcagagctttgtcttttgggctaagtgtaatattcgtccatttatccagttaatgttagtgtacttaagtgcccaccagccactgttggaaccttttggggtggcatgtaagtgagcaaaataaaagataactgtcctgcagaagtgcggagcttacattctggtttgaggaagttgagaacgacaagtcacaaacagaacacaggggaaaagaaataagtgataaacatgaatgccgtgggagaaagtgaggtaagggccatggggagcccgagatgcaatttcaaaataagtgtgttaggataggcttcacagagtaaagtgccttccagcaaataccaggaggagctgaggggattagctagatagatacttgggggagtaaagcccaggtagagcttgcctcttagtattgagcaaagtgttccaacgtggtgtggcctgggtcttcagtgaacagcaggcttgtgtggctggagtggaatggataagggggcggtaatattaagaatgagttggcagcaaggctcaagtacagtcaggaaccttggagcgtttgaatccttttagttgtttgcaagtgaaggcaattatccacttaatttcggtaagatttcacagcttaaccacagccactaattagtatgtgaagttaatgactaaaagtagactttttttttccccccaaaatagaatgtattggaggtctaaatgtagctgcggttcccagtaagcacagcgtggatcaagacagatgagctcattgtagtaaattttctgtttgctcttacgtagagtttttgtgcgtgcagaaatgccctgcttttgcctccccctaagagcttttctaaatacagtttctaactgttaaatgatgttgctgtttgtgacagtaaatctctactcacgtgggactcgtaagtagttgtgacaaacaagatgattaaaaaaggtacccactgctttaaggagcttaccaacctgtacaccagatgaacacaggataaaatacaggatgaaaagggatgggaaggtttgctaagaggacaggactcaggaagcaccaatgtcatgatgtcattatggtcatagctaacctttatttctcagtttagatttcctttgagttcatcttgctcagcgtacaaaggagcgcgcctgactcacgattttcaccttgaatgtctgctttctgtaggatggggatttagttgtcagtttttctatgtctgacgttttatgtctaaccatttattggatgaattgactatgacatgattgcagagcatgaactgaaaacttaagcactcctcaccatcgggtgacatatgacactcagcgttccacatggtggaatttagagctctccagcagtgccatctttctttaccttagcctctgttctgccaagatagatgtttctagtttcctaggcagttaagggttttgttgttgatgctgttgttaggggttttgttttgtctacatttatttattagctctacttcactctaacaaaacccctacaataagcaatgtaggaagagaagggcttattctggctcatggtttcagaagtttcaattggtggtcagttagctcattgccgttggccctatggtgaggcagtacatgatggagagtgcacaaagaaaaaggacttttcacctggtggcagccaggaaaggacatggaggacaggggtcctaatagctactcagtaacctaacttccttccattaggctccacctcttaaagggtccccctgctccaagtagcatcatgaactgggaaccgaacttttctctagagggttttggggcagtatttcagatccaaactctagctatgaatagtaggtgatggcttacatggatgattgataccaccaaggtacctgtctcagtgaaatgtcatcaaagtgtataaagcaagccttgtaagttggctaagttgctggcaacagagaggcttggccagaccagtctcagatgatcagacaccctccagccgggaaggtgggttacaaagggaattaattataagtgccaaaaggagtttgatttgcagtcacgtttgaggatgaagtggaaggatgttcatgtgtttacggtacatgggttgtgtctaatctgagaacagagagctttggggaggagccaggtgagttgctatggcaaaagctgccactccctgctaaatactgttaggtgccacctctttaaaaaaatcatttgaaagaccagtatttgaaaataagaaaaacattgagccccagaataaaacatattttccaggacattgattaaactgtaaggagcagagctggaatttatgctgaggactgatggctgtctaggcctctcccctttattccgtgttgctttgctttgtaacagtgtgctgacatcggccttcacattgtactgggtttgttgaagtgtgatcagattttctgcaatgctgtttcactcactataaaggtgacccttgtaaccttccgttttgtcttctcagatttttaactcagtttgacaatgagcaagcgcagaaagcttccggctcggcagccagcttgcttggagaccttcagcccagacgtcctcaatgacgtgtctgagctctttgccaagagcttttcctaccgtaagccactcgataatgagtggcagttaccagctcccacggagagcttctcctgtgggcacctcgagttcagggctcttctagacttgaagaactccctgaacgaagtgaagaacctcctgagcgataagaagctggacgagtggcacaggcacacggccttcaccaacaaggcaggcaaaatcatctctcatgtcaaaaaggccgtgaacgcggaactctgcactcaggcctggtgcaaattccaggagatcctgtgcagtttccccctcattccgcaggaagcttttcagagtggaagactgaattctctgcacctgtgtgaagctccgggcgccttcatcgctagcctcaaccattacttaaaatctcaccggttcccctgtgaatggagctgggtggcgaacagcctgaatccataccacgaggcaaacgacaatcttaggatgattacggatgaccggctgatggcaaataccttgcactgctggtacttcggcccagataataccggtgatatcatgaccctgaaatatctgaccgggcttcaggacttcctcagcggcatgtctcccattcacttggtcacggctgatggcagcttcgattgccaaggaaacccaggtgaacaggaagccttagtgtcgtctttgcattactgcgaagctgtcactgctctgatcactcttggagacggcggctcttttgttctaaagatgtttacgttgtttgaacactgttctgtgaacctcatgtacctgctaaattgttcttttgaccaagttcatgttttcaaacctgcgactagcaaggcaggaaactcagaagtctatgtggtgtgtcttcgctataagggaagagaggccgttcagcctctgctatctaggatggtgttgaacttcggcactgagatgaccaggaaggcgctctttcctcatcatgtgatccccaaatccttccttgagcgacacgaagagtgttgtacgttctttcatagataccagttagagactatatctgagaacattcgtctttttgagagcatgggaacgggggagcaagagagactcaataatctaagggattgcgctgtacaatattttatgcaaaaatttcaactgaagcctctttcaagaaatcactggctcgttaaaaagtccaatattggttgtagtatgaacacgaaatggtttggacagagaaacaagtattttaaaacctataatgaacggaagatgatggaaaccctttcatggaaggataaagtagccaaaggatacttcaatagttgggcagaggaacacaccgtctatcatcccgggcagaattccctccttgaagggactgcttccagtcttgagtaccagtcgtggcaagtcttagaaggaaagaaactgccgaaggtaaagtgttcccctttctgtgatggtgaaattttaaagactctcaatgaagccatcgagaagtccttaggagaagctttgagcgtggatgccaaggtcagttccaagcagcaataccgctgttgtcccgtcttttcagaagagtcagtattatccgagttgttgaggcttaccaagtgccttccggacgaacagggtgcggaacccagcggcccagtcaagtgcctgctggtgggctcaccggccgtctgtgatctccagatgcccgcgccactggaaatccagcttgtggagtccgtggagctcacagccttcagctgttccctgcttcacgatggtgacccagcctaccagcatttgttcttggactgcctgctgcactcactgaggcggcttcacaggggagatgtgatggtcttgcccatcctttcttgcttcacgaggtttatggctggcctgaccttcgtcctccacggctgttttagatttatcacgttctcttgtcccacgtccctggagcccctcaggacctgtgccgtcttgctgtgcattggttatcagaaccttccagatgcagttttccagtttctacagaatgttcatgacctcttgagcaagctgctgcaccccagtgcccctcggcagattttacagttcctaccaatggaggcgctccttcaggggacgctgcttgactttttgtgggatttgaacgctgccattgctaaaaggcatctgcatttgattattcaaggagagcgagaccaagccatcggcagccttgagttataaaattgagcacggcattgatgacgtgcagccgttttgtgacttacagtttccgatttcattttacctgccctatttatttaatacttttcattttggagagacaccaatttgtgtattaaaggacattaattgtggaaagttgtggcttgttctgatgtgaaggatatatgactcataggcacagagtttttgtggtaggagccgtgtactgatggtatttagcccctaatcatgtgacatctgtatgtgttcgagtggctacacgcttgcttgcatatacagttgagtcagtcttatctgctgcagacttacaccctgtgccttcattcagactttttccccaactgattcctctcttaggctgatgcttttaatgattgttagaggttatttattcatgacaggaagtgagtcactctctggcttcactatttacctggaagcacttggcatgtctgtggacttcagggatctttattccagattgtttgatatgtgccattgccttttgattggtggcttcattttctttgaattgaaatgaaatacagattttttttttgtatgacttttgctagctataactacttcaactaataagaaagaacagctttaagccaaaaccaaaggtcatttttgtacagtgaaaaactgtgtctagtactcctttgtcacgaaacacttccttcagcaatgttggcatttttaaggaaagatggttttaaggcttggtgtgcagtctcctgtgggttacaccggagtgtgatggttgtggcgaaatgtaacccagaatgatggctaaacaaactttgtatctttattggttttgttttttagtatgaaaatagcaccttactgagattatccatgagatagacatttttatcaatttcattgagaaatatgtatttaataaataatgaacttttctaccaaggtgttaatttgtcattattttgaaattttataaggtacataattagacctcatataaatttttaggtatttctttgttacttaaaaaaaaaaatagaagtattctatcatgtatccaattaacaaatagttcatgctctgctatttctgagttccattacaagccacaaataaagtcttcagcaggtgtgttttgtgtttgtttcattaaaagataatcatagtagaagtttataagttggaaacttccaaaggaaggttgattgggaattaatgtttcatttcctttcatttgcattcatgagaatgtactccttcaatgttctattcatgggaaatcttcaggagagaatttgtacatgtcaggggctgggctaggggggtatggtccggtggtgaaagtctgaggtggtttctctctgaaggaacttcctttcctaccagtgacttgatgagggtgggtctggttagttgcagtctaccaggagagaaactactcttgctgccttgttagtaataatggattgggttttgtttgtttgtttgtttgttttttttaacttatttaacccatttaactaggatatagataaacatttgagtttaggacaaagtgaaacttgcttttgtgtgtgtgtgtgtgtgtgtgtgtgtgtgtgtgtatacgtacatatgtgttagtatgtacatgtactttgaggtcctggaggccagaagactgtgggtctcttggacctggagttgtaggtggttgtaagccacttgatgtgccttctgggaactaacttccagtcctctgcaagaacagcaaatgctcttaacttctgagtccccaaaacttactttctaagaccatcaaagattgaatttttcaaaatactaatctgtattgcaatatagaacatttgaacatgcttaaacagtctatcatttttagcatgatatgggggagttgaaggaaaatgtcttccataggctctggcattgagcacttaattcccagtagtggcgctgtctggggaggtctaggagatttggccttactggagaaagggcctcactgaggggcgggctttcaagttataaaaatgtgccattcccaacatgccctctgcttcttgcttgccataaacatgagctctcagcatgaggcaccaacccatgcttcctgctgtgacgggtcactataaaaggagctgcttggcccctcctcactctctttaagctctcacctctttttctcctctctagccctcctcctctctctcccttccctcctctctccacatggccatggccagcctttctctttctaccttctctcttccccctgcctttctacaataaagctctaaaaccatagactgtctctgctcatcaaggcccactgtgcttgaacgatgggataagctttccgctaaggagctgtctaacctcctgctggaagaccttcctgcattccagccacggaccaaacccaggtctctcgcccttgtgacaatcctttcgtgtccatcacccagtgcactggaactctggcgggatgcgggcccttgcccactccctttattcccccacgctcactgacccacatctggtccttttatctggctgtgctatcaggtaactgtggggaggagcatacctggctatagtcaggtagctcgggggtgggggtgtgggggtggagtctagacagaagcttgggacattgtgtgacttatagtcacagaatcatggagtttggggctctgtggtgtcagacacctgactctgggaatgtggctcgatttcccatcccttgtagagttttctaccgggttgctggagcaagcctcattcaaccaaattaggctgcctatcatagtcccacaagtatatattggttatattttagccaagtattactcttgatagtttcttttaaatcattttactattactctttttaaaggatttatttgtttttactctatgtgtgtgtgtgcttacctgcatgcatatatgtgcaccatgtgcatacctgatgccagtggggccacagagaggtgtcaaatctcctgggtcaggagttagggatggttgttagtctctgtgtggggtgctgggaactgaacccaggtcctctgcaagagtagctatctcaccagcccctgcacatttttgatgtccaagtggtccaattttggtttggggctgtaaatgaagggcatctactttcaaaataaactacaaagatagtattattaactttgcaaattgtttttccattgtgataggagacagctagacttttttctgatgtcacactgcgtttgttgcaatactttgggggctgaaatacttacgaaaaccgctcttattatgggggaatggctcactttgtatcactttcatttcatcttcagaactcacttaaaatgcctgtcccagagtacttgtaatcctagcactagggggaggggacacgaaaaccctggggcctgccagcccgcccaccagtccagcctagtcggggagagctagattaatgagagaccctgccttggtgttcctgaggacagcacccaaagttacacccttctcgcagtctcacccccaccctcagcatatatgtattaaaaaaaaaaaaaaaacctccctcccagggcctggagacgaggctcagtggttaagagtgttcgttgctcttgcacaggacctaaattcaattctcagcatccacagagcagctgacaccatctgtaactccagttgcaggagatctgacaccctcttctgacatatgggtaccaggcaggtagatggagcacacaggcaaaacatccatacacataaaagtaagaatatccttatatatcattgggaagtgaggagtattttttttgttgtttgctgacaatggagcctaggaccttgtatctgctttataaatactctatcactgagctgagctgtctctggtcccatgtctttttttttttttaaatgacagggtctccctatattgcatgttttccttgaactttcgatcttcttgcctcagcctcccaaacagctgggattacaggcttctcccaacagagcaggctggaagaccaagtataatcctaataacttctttaggtcatggtggatagtcttcgctacattaaaacttgacagatggcagcttcttaagtatgtgttgaaaggaatctgggatgggtaagggatgtttttcattctgctactcaaacccgtttgtctatctcaccctttggatggacattttgcccgtgtgtgatttttatttttgaacgccgaatttgtctttttgaaaatactggtttcctgagtgaggcagagcttgcaaatgttgacatatttaatttcacagtgtcaaaatttccattttcaagcaatcaccagtgatctcatcagaaaagtctgagcagcacttagggatggcaagcattagctttctaaaattctcggggttttttcaccctgatgctcggattgttaccatggcgacaaatgccgacactttccttgggatgacagcttactttatccatttttgagaaaatatctgccagacactcaagtctgccctgtgaagatgcataacttggggctgagatggtcagctaataaagggcttgctgtaaactcagggtttgtgctcaagacccagcacccaggaatattcaaggtgtgtatgcggggaacatttaagtaaaaatgcccccctccatgagcacatgctaagacatctgctggtttgcccactcgagttttcacaaagtttgaccattagctcatgaaagataaaatagaatctactgtcttgtgttagtgtggaaacatacagactttcacttgatttttttttttaatacagtttacatcttaacaaaagcacccatcaggacatccagcaccgccgcttaattatttcatagacggctttgacatttattttaaaaataagtttccaggtttctgtctgatgttttcaaatcgctgtcatagattttcttagggtttttattgctgcaacacaaacacaaaaagcaggtcaggagggaaagggtttattatttggctcacacttggaggaagtcaagacaggaactcaagcggggcaggaacttggaggcaggggccaatgcagagaccgtggtgtcatgtatgctcaaaaagcaagtttggaaggaaacttgtctgtatgctttggtttctccctggtccccctcacaacagtgctctgataccttctgtggtggtggtggtagaggaggacaagaaagaggaggagggagaaggaggagggaggagaaggaggagggaggaggaggaggaagaggaggaggaggaggaagggggaggaggaggaggaaaaagaggagcaagaagaggagaggaggcctgtgtctttggagctcaaggttgtgattatattcgtgttcttgtcccaacccaatggcagtttgggccacgcatggttgcctgcctcttcttgagccgtggaagggcttaactgttttcttcccactaagtgtgtgctccgcactgtcctaaaggaaacttttacttctactcccctgggacatttttaaatcagggagataaggagagtggggtccctgcccttcctatagcagctgtgcctctcctgcccgtgtgtctccaggactccagccatgttgtttgagagtgaagcctgaggggaagacaaaccccgtgactgcacactcagcctctgtctgtctgtctgttatgattataggcgactcttcctcaccagcagtctgtccctaaggactgactgacaagcctgtacgccatgcctccctgtcccttgtctctcctcagatttaggtgagttggtttttactcaaaaaaaaaaaaaaaaaaaaaaaaaagctgttaacatataatttgtttgatttatttttacttttattttttagcttttagttttaacggtaggataccattgttcctagcagttttctagtgaattcagagaccggaacgagcaccccctttaccttcagtgtcttggtcagctgggatccgatcagcctccccaacctcaactgagactgtctgtgttagaacaatacattttgtggtcacactactgggcatttgaaaacagaacctggtaaggattcaacaaaagcctatgtcaggttcgaacagaatgtactctgaataaaaatcaactgttaaagatcattttggagatgggagaggaaactgtaagtgacaaccaaataaacaaatacctatgtgaccttgatgtccttcattctgtccaaggtaatgtttatatatgcatatatacatatacatatacatatacatatacatatacatatacatatacatatacatatacacatacatatacatatacatatatatatacatatattcacacacacatatatacacatatgtatatcatatatatcatagatatgatatattaatatatgacatgctataatatataataatatataatatcatatattttatttcagatattattcaattaatattaacattaaattacacaattaaattaaatatttatcatatctgatatgctttatatcttaaatatcaaataacattcaatatttgatattgaatattatttaaatattaaatatattatttaaatatatatttaaaatgtttagatcatgagtggtatttgaacatgggctaaacactaaagggttgttattttgttagctactatgatgatagtttagggttttttttttgcttcttagagacacattctgatgtatttggggttgttatggtttgaatataaaatgccctccccaagacttctgtgctaaactcttggctctcagctgatggcaatgttttggaaaattctggaaacttcaggaggtgaggcttaactgaagaaagttggtgctgtgtccttgggggtgtcttgtctctagccctttactgtccctctgtgcttcctgtctgccccgctcttgttgctaagatgttctgcccaggaaatgggacagagaagctgtggactcaaccgtgtatcagcaaaacaaatctccccccttacgttgttttaccagggtccatcttatcacgggttctcaaggctgaagaaagggtatgttttaaaatattcaaatacaaaaaggtgaagagagatacatatgtttgtttgttttttttattgaacatctcctgcatggtatcactatatgaggaaatggacagatatattcaaatttcctgcctgccagataggatctaataaatgctgtttcgcttacactgaattttaacagacttgagaggaagattttaatgtttgcggctcattaaatgtcatacctcttcaaactgctttggggcagggggtgagggatccaaataaacagaggcatctaaagtgacatgaccaggagggggggggggcacacaaaatacagcacactttcactgaaaacgtacagagcactgtatattatagacataccaccgtatatagttacagatagacaccatagaaacacctgtcatctagaggtcttgctgctactcttctgcagaaacaatcaggagactctgtaatatcctgtccaccacgcggtggaatgacaagtagcctgaagtctacagggacagttaatcattgtcccgattgttttgatgagcatgcaggaatgacaggttaataataaatcccagcttgtaccaggaaggtgtctaaggaggtgaggtggcttaatttacatctttggaaggtactggcgatttaataatcttcctgcctcatacatcaaactaataccccggaggctgaaaagcaaaacactttaaattgataatctgaaaagcaataaaaccctgtctcgggtcacagataaattgagtttctggtggtcttgatagaccctcagtgtgcatgatctgtctacattttagagcaattcatggccactgggagctggggctgccatactgggcaagctgagaatacctttccagttgccagccttcccagaagggccgtgactgctctctgcttaagtctgcgaagtgaattacattaccttcatggtcaactgcaaattgatatagacctcagacgtacatggttttgagatgtagttctaagtggctgttttcaactgagtgttaactatccattctgcccttgtagtacatgctcttaaaagaacagatgccattttgactcgtatttctttttcttcatttgagatgggggtcctgtaacgcagcccagcctgctctctgactccccgtgtagctgaggaccgatcatcttgaggttctgatcctcctccatggaccaccacacccaatttatgccacgctgggggttgaacccaggactatgtatggtaggcaagtgttctaccaaccgagctataccctcagcattctaattccttaatatggatgtgtttaactggcaagagggaaggaatactgaaagctcagaaatctgcctgcctctgcttcccgagtgctgggattaaaggtttgcgccaacaagcccggcttggaaagctttctttttattgatacacttacgggaaatgccaccatccccgacgacagcgtgtattgtggtggtttcatgagaagggaagtagagttatgcaagtccagtgtgcctcctcatgttagttgctctgcttgctgtgacataattacatacagtaactagactgtagcgtgtgatggctgatcattttgctagtgccgctgataatttcagctggctctttccggatgcttaaagtactgctataggaaatcggcaaaacaaccttaaattgttgatgttaaagctgttctgcttctgcttgctgccgccagctccttatttatttatttatttatttatttatttatttatttatttatttattgcaacagggtttctcagtgtatccccggctgtcctggaacgcactctgtagaccaggctgacctcgaactcagaaatccacctgtctctacctcccaagtgctgggattaaaggtgtgcgccaccacgcccggctagctcctaactcttaagtcacaactgtaaggtggggcacacattttatccggtcttcagaagtgctctgatctgtactgaataaccttcagctaataactagatcatacatccaactcagaaataaggaaatgcctgtcaccccaactgctcctggggtgctcctttgtcttggtcagaaatgcaggtggggcaggtagaagaggctttagagaaaaaatctccctacctcctcctcctgttattcacttggcaaacatccatggagtgccctgtgcctgtgatgggcactgccttagtcctggaatgtaaagaccacagactcatggaggcagcgctctaaggcagttcctgtggatgctgtgacaggtccctgtgggctctgcagcttaacagtccccagtggaggttagcttcctgttctgaagatagtaacctaaggtcacagggtaggcagggctggctgtgtctcttcctggaaggtctaaggaaatttgtcttttggtttgaggttttgtttttgtttttttcaaacttaagacacaatcggtgtttcttggctcagagcccctttgctatcacttctgtccttgcgccgttttcttctgtaactcctcagtaactgccagcctctcttaaaaagatccttatgattaaattcagcccacctcaaaatccttaatcaaatttgcaaagacccgcttcccgcctaactcacagcatccagcaacgaggatggggtcattttaggtggttgctagtcacagatttgcactgtgaactattgttgctctctggctggataccagcgattaaatatcttagccttctggaacctcaactttcttatctgcaaaatggagtaaatgctacccatggggctatctgatgcatgtaggggttcagtgaacgggaaacttccgtgacaaaagcacgtgtcctcagtcctttgaggacttccaagtctagtggaggagatggacaggcaaacagataaccatgcatccacgtgaagggccgtgatgagcgccatatttgtctcgggccaccagaacctccaagaatgagaaggtgtattagtcaaggttcttccaaggaaccgaatttaaagaatgaacctgtcgtgatacatatggaaaggagatttattagagtggcttacaggctgtggaccagcttgctcaacgatggctgtctaccaacgaaaggtccaagaatccagtagttgttcagtctacgaggttggatgtctcagctggcattctgtatcagaagaattcaaagtaggttttaatgccggtgagggttttaatgtggacttgctagccagagcaagagcaagcaaggtaaagagagagcaaacttcctttctccatgtctccatgtctgcgaggtggcctcgcagaaagcgtggtccagattaaaagtggctcttcctaccacaaaagatctggattcaaggtggaccttcccacttcaactgatttaattaggaaaaaaaaaattccttcacaggtatgcccggccacttgggctttggttaattccagatgtcttgtcttgacaaccaagaatagccatcacaggaggcaaagcaaaggtttcctgaagctactgcggccaagaaatgtcaggtactagaaggtcatgtattttaatattgctgaggtcctgccttcactaaagaataaaaaaggtatctcctagtcttgaaatactggtcttagagcatatgtaatttaacaagttagcactttatacatttgtggaattgaatggtaaaaagagatgatcaggtaggtgtttggacaaagttggaagttcctccccctgacacccttctcctcctcctcctcctcctcctcctcctcctcctcctcctcctcctcttcctccttctcctgattctcacagcctccctatctcagagaagaatcagagctcatctgattatccacatcccaagatgttcaggggattgtgtttattggtgcccagggttggggaggaaaagatttatttggcttccacttccacatccttggtcattatcagaggaagtcaagagaggaactcacacagcacaggaacctggaggcaggagctgatgcagaggccatggaggggagctgctcactgtctggctttgatcatgaacagcagtatagaagtatacctttcctcctccatttgctttttagtcatggcgctttgttgcagcaatagaaaccctaagagaagtttgcaccattatcaggtatttctgtgacagacctgatcatgttgtttgggggaagattatggacggactttagaactttggtctagaagagccattgagtgttgagagctcagtgggatgttttataggaggttggaaggtaatgttgaggacaatgcagatgatgaaggcctggcttgtgaagtttcagaggggggtttaaaggctctagtgggggcatttgttattttgaattaagttgctctggtcacctggggctgcgggattagccgtgattaacaaaagatcagcaatgttgaagtgaaactgttggattcctgggacggttgatgctggtcagctggagctaagaaatcagggatgattaagaagagaccagcatcacggaggtgaaatcttctagaaagtgttttctcacggtcagtttacagatgctttgttccagaactggccgaggttgtatctggtgctggccccttggacttggtaatgtgtaagagtcacccagggggtactgcttctgaaggcatgaaggggtcatggagagtagctgaggcttgacactgaaaaagacaggagaggccattagtcaaggtgcagctgacggcccagggctgaagggctcatacaaagaagttgaagtttggtactgtgaagaaagcttaggagggactagtggtaaaagtgcagtccagttgcagtagaagaccccagaattttggagatgcaagtggggtaggataaccaccaagagcatcagcagccgcagcagtagcagcagcagcagcagcagcagcagcagcagtagcagcagaggacagagctggaaaggtgacccaagaccaagagcccagaggattgtgagttgattctgatattggaaactgagttatttacactgttggagttgggttttctttgatttatttgtgactgtgcctggctcttctctctttaagtaagaaagtatttcatttatttttattttactagagctccatgaaactttgaattctaagagactggctttttctttcctttcctttcctttcctttcctttcctttcctttcctttcctttcctttcctctcctctcctctcctnnnnnnnnnnnnnnnnnnnnnnnnnnnnnnnnnnnnnnnnnnnnnnnnnnnnnnnnnnnnnnnnnnnnnnnnnnnnnnnnnnnnnnnnnnnnnnnnnnnnccccctcccctcccctcccctcccctccccttcccttcccttcttttctcttcttttctttttggtttttcgagacagggtttctctgtgtagccctggctgtcctggaactcactctgtagaccaggctgtcctcaaactcagaaatccacctgcctctgcctcccaagtactgggatcaaaggcgtgcgccaccactgcccagctgagattgcctatttcaaagggactaaattttaatgtgtttgaatttgtatagaccgtgggacttttaaagttatgtatgattctaatgtgagatctaggggtcgaataagaaaggaaaggttgtgttttaatagtgatgtgtttgtgtatcaagttggtaaagggttaattgccctggctggtcttgtgtcagcttgacacaagctggagttatatgaaaggaaggaacctcaattgagaaaatgcttccatgagatccatatgtaaggcattcgcttagttagtaattgacgggggagggcccagctcctagtggatggtgtctgtggggtggtggtcctgggttctacaagaagcaggctgagcaaatcacagagagcaagtcaataagcagcatccctctgcatcagctcctgcctctagattcttgtcctgttggcgttcctgtcctgacttcctctgatgataaacagcaatatggaattgtaatccaaataaactctttccttcctaaattgctttttaaaagtgaatttagattttttttttttacatgctgatggtaccgacatttatttccaaaggttggcttattcttatttttgtgtataatgtgttttgcttatgtgcccacaaaggtgagaagagcaccctgaacaccctggaattgatattatgctggctgcgagctgccacgtggctcctctgcaggagcagtagatgttcttagtggctgagccattggtttgccctgttttctatcactgtatactgtaacaaatgactacagacttagtgactgaagacaatactaactgggatctcacatttctataggttgccaatctggcacctgtgtcaccagctgtccccagggcagcattcccttgtggagtgtcttagttagggttttactgctgtgaacagacaccatgaccactctcatatggacaacatttaattggggctggcttacaggttcagaggttcagtccattatcatcaaggcaggagcatggtagtagtatccagtcaggcatggtgcagggaggagctgagagttctacatcttcatctgaaggctgctagtggaagactgacttccaggcagctaggatgagggtcttaagctcacccccacagtgacacacctactctaacaaggccacacctcctaatagtgccactccctgggcccggcatatacaaaccatcacatgggggttctgagggagactctgtctcgttgccctttccaccttctaaaggttccctgtcttccctagcaggtagccccaccctgctgtcagcacagtcttctctctcttatccttgttttaattatagtaagaataattcttcactcccaagggtccatgtgatcagatcgggaccacacagataatctctccacctcagagtctagaccctcagtcacatctgcaaagtcccttttgccacttgaagcaatctattcacagtgctgaggactggggcgagggcagctttggagaacattagtatgcctatcacagtcacaatcattactgtgtctaaatagctaattcctccctgtcagctcctctgaaatgcagaactgggcattccatcatgcacatctccatgtggtccatgtggtcatttaacagacccctccaacatgcgtttgcccaaggctgagctcttgaacgtctttccccaaatctgcttctctcacatctcctaccaccccaggtaatggaatctctgccttttagatgctgtgacccaaactccaggccctgattacccttggctcctctctagggggtttgggggggatttttttttcaacttcatcaagttctagttttggaagataaccacaacattatgatttttgcaactccttcgctgccaccctcttgccttggtggctaccatctcctatttagatgatccccatatttcctaatattagaataaaataaaaggcccaggagctcctctcctattccctcacaacattgttggttttgttattattattatgttaacaaagtaacaagtttttttttttaccgcattctcatgcatacttagttttggttgcccctcccccacccctgcttcccatcactacttcattctctgtctctgtctctctcccactcccctagtatccccctcttttctcttcacccagctcatttccctcagccatagtagccaccttactacttcacaaatattcagggctcgttcgcacctcaagatcttcgcaccagcgccttcatcctgtctggaaatctccctcaccccgcccggagaaaaatcacatggattcccgagtactcgcctctctcccaagtgtttgctcacatgtcatcttctaggtgggatctgccccaagaacttttaattaaaataaaccgcagcttcgcggccctcttccagtttgtttttcttgtatttcataatttaattatttgttgtgtccaggttcacttcccaccagttagttaggaagtgaactcctcaatcaaagtcaagtgcttattctgctgtatccagtgcttatctttgtatcaaggatagagtttgccctgtaggcactcaatacaaggagtacttatacagaccgaagtatcagctctcaagcatttctgagtgctttgtagattagttatctgtgctactcagccttttgtcataataaagtgggctggagagatgactcggtggctaagagcactgactgctcttccgaaggtcctgagttcaaatctcaacaaccacatggtggctcacaaccaacaatctgtaatgagatctggcgcccttttctggtgtgtgtctgaagatagcgacagtgtacttacatacaataataagtaaatctttaaaaaaaaatcaaaataactggcataattgatttgaggcgagttttggttttcagtgtgtgtgtgtgtgtgtgtgtgtgtgtgtgtgtggcagagggtgggggttcagtttgtggttgctcagcccctgtgtttagacagggcttgacagtgctggtgctggtatggtgccgggagcatgaggaggagagactctgtcacctcannnnnnnnnnnnnnnnnnnnnnnnnnnnnnnnnnnnnnnnnnnnnnnnnnnnnnnnnnnnnnnnnnnnnnnnnnnnnnnnnnnnnnnnnnnnnnnnnnnnnnnnnnnnnnnnnnnnnnnnnnnnnnnnnnnnnnnnnnnnnnnnnnnnnnnnnnnnnnnnnnnnnnnnnnnnnnnnnnnnnnnnnnnnnnnnnnnnnnnnnnnnnnnnnnnnnnnnnnnnnnnnnnnnnnnnnnnnnnnnnnnnnnnnnnnnnnnnnnnnccctgtctcatattcaggttataccactctcttacatcaaagtaattaagatcaaacttgaactttgggaggccgaaatgaacaatttagcagtagccagctccattgcaacatgagaggattctagaaattggatccgctcgttgacttaagtgtgtacatgtttctgcttgagaaatgatataagcaggtaaattcagctggttgagatctgcaatgaggagagtcgacatccaatttaatcagtatgcttgagttctgagtgggtcatcccttggcatctgtcttgtctcacactgagaagtaggcagttgcaagccgacagcaacagcgatatttctcagaatgaatcaagtgatcatgaaatgttaaagttctaaaacttgattccaggcttgaggcaacaaatataaacagtgaacttaaaaccttttattatacaaagaaaaggaacgagaaggcagaaggggaggggaggggaggggagacagaaggaaggaaggaaggaaggaaggaaggaaggaaggaaggaaggaaggaaggaaggaaggaaagaagagatgttgcctaatggagttttggcagatggatagagaaacaatttgggagtcagaatagttacagaaattgaagcacatcaaacatgaacatatctgtgttcatagtaatacttaaaaattatccttgggcgtttctccggtacccatgaattattcaaaaaaaaattgaaagttcagaaccaagcagttactttcttttcttctatgaaccatattcatggaattgcctatgaggaattctgtgaattgtatactgtgaatattaacaatttttatttgaaatgtttttttacatgtgatatattttaatcatattcctttctctccctcatttcttcccagatcttctcacctttttacccacccacccatctccattctttcttcctccctcccccctctgtctcctcccctcccacacccataaaacaaagaccaaaagcacttacaacttcaaacttactgaaagtaccagtcaggtgcagtaacctagaagaaagtacatttccttgacacatggagagcctagtcaccaacctgaggcccctgcatacctgaatgctttggtgtgaattcccaacatttaaagacaactgacttcttaagtaaccaagacaaatggatcaagttacttaaataaccatgctgtgatcaaaaccagaaaacagtgatgaaccagtttgagcctgtttagaaccacaagttacttttcatcgttaatgttctctagtcttttgcttttaatctctggctctgaccttggcatgtttgatgaacgctggccacttctgggtttgtttgatgtcgggggaggtgtgtgtattgtatacttgtgcatgagtgtgggtgtgcacagggaccagaagaggatattgagtgttgttggaataatctcttgtgcactgtgtaaagcatcgcctgtcaataaagagctggacggcctatagcaaggcaggagagaataggagggacttctgggaagagataggaattctgagaaggagtcaggtgcaggagattttcctccaacacatagaagttggacgtatgaaactgaggaaagataactagccatgtggcagacatagatagagagtagtttaaacaggctaattgagttacaagctagttcaagaacaaccctagtttaaggactaggcattaattcatgaataaattaacctctgtgcctttatttgggaactggagcagacatagaaatgactgtctggctctagagtgtcctgctctatcactctgtctactttctcccttgagacggagtccctcactgaacctggagttcttactggtcctcctatctctgcccaccacagtactgggactacagcccctcatgagtataagggattttaagtcaggtccacatgcttacatagcaagtactgtttctcactgagccatctcctcagccctttgagattgtctcatgcttagaacatcatagagccaagctgtgttgtccgttgagcatcttatcaacggtggagaattttgatgtgccccattgctgatgatgttctctgcagtcacttgataatgtggcgtctgtcaggcttcttcattgcgaagccattctcttcctaattagtaggtattttatgagcacatactttgagaatatttaaatgccttgttcttcatcaaacattcatttgattcatttatttaatctatgacctggactcatgggttctcatgttagtcaatgagctatgtgtcatccgttactatcattatttattttgattgccaaatatcttagattaattagaatccctcatgccttatcaatcagtctggcttctgggtccagaataagctgagaattaggtgactttaaaggcaaattttgttatgtgggataaagatattatacttacattgacaaatcctttcagagagaggaaacagacagacaaatgaccaccacaggtagggagactatctaatttactattccacaaagaaacgtacaaatttatttacttatttatttaatgtgtttgtatatgtgtgtctctgtgtctgttctctgtgtgtaaaaggttcctgttgaagccgggtaaattccccagagctgcagttacaggttgttggttgcaagttgcctgttgtgggtgctgggaaccaaatctgggtcctgtgcaagagcagtcagtattcttatttgctaagccatctctccaatcccatgtatgtatttgctttttgagactcaatcgaagccttgtatataaatatctagactacccatctccaacatgcaatgtttagagcccgtttaacccacaagctcccggttaaaatagacttgtaccggaagtcctgtttcatgaggtctgggaaagtttgactctgtctggagaattgtctccctgccttcagcttgatagcgagtactaagaaatcaaagagcattttttgtgacagtgatgtgacatctaaatgttatgtaggacccacatacaaaacccagtcttcctgaactgttgctggaatggccaaaggggctagtgcagacatagtgacaggtgtcactcaccagatagggagctggcctgcagcctccacagctgttcactgctggagcagccgtagcttgctggggctcattaatgtgcagaagcagctgcaacagcaagcaatttagtgcaaaataatccgtcaattaatttctttgttattggacagtctagatgcttgggccttggttaatgcattgaagggccctgggaatgaaatatgtcttgatagctctgggtgtattaacccaatggttgtcccaaccaatgctgggagcgtactaggacccccaaggagtgggagggctcaccccagactcttgtttcactcagaagaaatgatgtgaaaattgcagtactttgaacatggctgataagctggtgtctggactgggttcagagctcaagccggagcaattcctttcaataaagaaaggcaatgaaaaacaatgcagattctgaggcagagcacagcctcagaatcattcagggctcaccttctgccaatgctgaaaactcccttggaaatctctggcttctcacttaattaccacctcctttagctgctgcttccctcacttcccctgcgatctcattctgattccctccttgttgccaaacaaggctttctcttccagacaccatctgttttcaggagacatttggattttctcttctcttcctcgtgtgctccttttgaggcctgtgttttcccccttgcaggattgccgctcctctgtgaccccatgggtggatgggaaggccactctggcttgcagaactgaaatgaagttggaacccaacagatttgggacttgggcatatccttcctggccctccagccctaggggttagtgtagcatatcttaaaaataccctttgtcttgacaaacaaacaaaaaggtcttttgtttgttatgagacctccaagaatgcccgagggagtgatgtcattcttcccaatagcagctgcaacccctagaggggagtggatcttgaggctacacagagtatctggaacaactactcttgatgtatggtatagatccttgtagtttgttgttgttattgttgtttgtttttgctacaaagttatcagaatatgtaataagaatatataacacatgtaagatggaaatatatactgtcagccgtactcacagacacaggcacacacacacacacacacacacatacacaacacagagaacaactttcaggattcacttttctctctccatcatctgaatcccagagatcaaacctggcaggaagtgtctccacccactgatccatctcactagcctacttaataactttagtatactgagaaacaggatgtcagcatatataaaacttcctaatgcatttaatatctggcattccatagtatgcatgcaacacgttttctttacttgatccgtcgcagacacacatttgtggtgctttgaatgagaatgacctccgtaagctcatatagatcaatgcttagtcaccaggggctggcactgtttaagaaaaattaggagtagtaggtgtggccatattggagtaggtgtggccttattggaagaagtccatcactgcctgggatctgagttttccaaagcccactcaggcatagtatgtctctcacttcacctgctgcctgtggaccaggctacaaagctctcacctactgctccagtaccatcgccatttgtttcttgatatgatgcaaatagaactgtaagcaagcccacaatgaaatgccttttcttataaagttgcgttggtcatggtgtctcttcaccgcaatagaactgtgactgagacaaaagctggtaccagagaatattgctgtgatagccttgtctatgctgtcatttggaggagtatggaagaccctgggactttataccagaagagcagttgaaggttttaagcagggcacggaagacagtgtagggcactgtagactgcacagttccagttcaagaggtgtcaaagggaagtgacctgcagaccattgtggtattttggctaagaatgtggctgctttctgcccttgccctaatgacatgctggaggctaagttgaagagttttaaattaatgttgttgttgtcaagacagcctaatatggactgtgtcacatggttgttactagtcactctcacgcagacctacaatggaaaagagcaagcaaaatgtacagtttgaggagaaaaggagagccaagaaatgcagtgttggagcccagctctgtgctttaaggagataaaaagcctgatgctaaatggaataaagggagtggggacctcaagacaagaccccacccagctaagcttccaaccccccccccccaaggaattagaggaaagcataaatagcaaaggaaaccatcaacagccgattatgcaaatacaagtcggggtggggagggggagagggaggtccagcttccatccccaactagcagcagaatctggtcacatggttttgaatttagagtcagaaatgatacaggaagggttaaggaatcttccctccaggattaaggagagccactgaagccagcagtttggctgggcaggccccccccccccgccttcccatgccctcccacgcccacacccccaccccacatggaggcccagagaggctattgcacaaggttgtgaaagtcaatcctggattacactggtgatcccaggatgttggagataattgccaaggagagctgcaggctaggtacagaaccagcccacgagagagaagtgtgttaccataaacaaagttgaaaggaattgatggcctgaagaagactttgacatctgacatggagatacaggctttggagtttgacccactgggttttggtctttctttgctcaacatttcctcactctgctccctttcctccctctggaatggttggttgtctccatatgtcgagcgagtcgaagctttgggaaaggtaattagggatattaggaagtgatttggtatgtattaggcattcaatatcctaatgaaatggaccccagagggctccctagccccctttgccttgtgcaaacaaagcaagaagacggacatctatgagccaggaagaaggtctccatcagacacggtgtgtggggactttgctcttagactcctggcctccagactgagagagatagatgtatctactccatccatagcatttttattacaacagctagttcgacttaactccagctgtcaacagacatatcccagcattatttgagggggtcttagttgaaggatttctcagatcagattgatccaaggccacatccctgaggaattatcttaattgctaattgatgtggcggggttcagcccattgtgggcagtggaaggtagtcttggctgtataagaaagctagtggggagtggtctggagagcgagcaagctagtaagcagcatgccttcctggttcctgctttagttctgtacacggagagagtgtaacattcagaaggcagcttggagttggttctcctcctcaactgcatgttgtaagagttgtcaggtatggtaggaaattccaagatccactgagctgtctttatagcttttgggaattttttgtttgtttgtttgcttttgagacagggtctcttactggaaagcgggaatctctgattaggctgggctagctatcctgaaagcccagggttgtccatcaatgcagtgagagagagttacatgtgtgtactgctatgtagttttttgtttgttttaggtaagtgccagagctcaaactcttcacacttgcctggcaaatgctttcccagctgagctatctccccacacagaaatggcattctgtttgtgtttatttcctctggtttttaagactataaaaattagaggtctgaattaaatttattgattacctttaaactgtagctgagatctatagatccagactcttgatctacattttccctagacatttctcccaagctatatgcaaatgaagatctctgggtagcaagatcccaaagaagagtctcttggttctttcagaggtcaggatcaaaacagttgctttacaatagagaggctgctgagtttgggagtttaagcagtttaactatcaaccaataccttggtttttaaaacacacataaaaaagcaagctctcaaaccatggcaaagaagtgttgtcttgaccagcagccttaaacaaagctctgaaaagtgtgtgtgtgtgtgtgtaatagaagagattttcatattcaggatgccaatgttgaacagaatgcatgctttttttatttttaagtgtgccatcatctgaagccttcatggcccttaaaaaatttaggtaaacctggtttggatccttcactgtacaacttacttgggtttgcctaaaagaaaggggtttcctgacatgtgagatttttcaatgacaagttttggacaagccctgcacaaaccaacaggctgatcattcggaacctctatgagttcagagctcttgctggaattttagctaatttcaaacagcctggctatttatttatttatttatttatttatttatttatttatttataattccacctacccttgtaatctggctgaggcccctgagggttattttattcaaatcttaaattattaaaaaatgttaactcttgtctcaacatctcatgtctgcatatctgtacccgtgtatgtggtttacagacaaagacaagttaaagaggctgcagccaagtgtctgtagtaggctgaggaagattctgtattggtaacagacagaccagtggcaggaaggcgcagaggaaagctgtggagtccagctgaggggggacaggggagactgggatctgagagtaggaaatgcctggttgaggtccaggtgggcaagatagtgcataggcaggcaggcgagtacacggtgtcagaagcagggtactgaggtgaggggaaggcctggggggagtgggcaggaagtcctctctgcttgttggttcttgacacatacaccaggtgtcaaatgatagattgctgtgtggttatgtcaccgtaataattaggtgtccgtcactttataggatccagatgtgggcgtttcagccttttctttgtctgatgtgtatgggaagttttgttgagccttttctccctgatacaactttaatacatccatgtgaccctccttatattttcagttcaccccgataaatttaaagactggctccctttcaactcctaagaataagtcatttggccaggcagtggtggcccacacctttaatcccagcacttgaaaggcagaggcaggaggatatctaagtctgaggccagcttggtctacagagtgagttccaggacagcgagggctacacagagaaaccctgtctcgaaaaaccaaaaaagaaaaaaaaaaaaagtcatttgttactttatattggacaggtggtacctgaaagaggtatggtttgtgagtccacccagggggctacagtcatccctttttcccaaaataaagtcagaaactcttcataaaatggaatctctcaaggctggtcccatcttgaaaaacactttcacataatggagtagcctagagcagggcgtggcttgatctcactggtctatcagactgtttctgcctctcacatttccggtgggtgggaaggtctcacatttgagtccacgagagtattccaaggtagagatgtgtctcatctgaaaggagttcttaaccagatacatagagaataaattatttctctcacattacataatggagacttttatataaacacagatgaaaacatttgacctggtttagaacattttaagcctgccttcattttctccttttcccaagaaccagaaagacatgagtctaccatccattacacgatggcattttcttctgttctcttagaggtcaccattaggaactaaactggggaggggttggagggggtgggtggtgtgctaagagcttaactgctttcttattttggggacatcatggaattttcctcagaggcctgtggtttgatgcattaacaaacccctcaggacacatactggctttacaaggggaattgtgtgagtgtcttaaaaaccaaggcatgcatccttcctcacggaaaacattaaagattcaagtcagatttggaccagcggccataataatgagaaagttgtcaaagccattcatcaggaaggaacgggggaagctgggaccaaaggaggagactgggggtagtctagagagtctcagcagctacagtctcttggaagtggcacagttgagcaaaggtagaaccctgtttgtggcagaggtcagacatttcccttggtttttccagtcctctcatttagcatgtctggacctgtcaggagttggagccgttggccaagggaagaggtacaaagatgtatgtggaaaacacaagccaggccaaaggagtttagcaagttaaaagcttctagaagtttctgcctgtatcccatcttgaaaaattatgcttcaaagaccagtaatgaagacaatggcgaacatttatcagatgccaactacatgccacacgctgcatcgcccgggaagtgtgcatggaaactacgtgatatcagccctacacacagtcaaaaagctaaaaatgaaaactttggaaaataccaagtgctgctgagtgtgtggaacaagtccactgtcccagcactgctagaagggtttcaaatggaacaggaggcttagcaaactgccagagtctacaaacaccaatatcctctggccaagaacttccacttggcctagaaattgcatacatagactcacaagaaactaccagaactttttatagccccacaactggaagcagtttgatctgtcaccaacagtagaatggataagaaaatccccttacatctatgatttgaccagaacacagaatgagaatggaccgttttacatatgacattgtggatgagtccccctgagtcctcacagtaggtctacagtgtggtttctactattgccgtcattttacaaaggaataaaaggggcccaaagaggatgttacttgtccaaggcaaggaaagtaggaagtcccgcagctgagactcaaaccctgactcttcttacccgcatctccaggtatcctggccctcagcttctggccttgggagcagcaggcacttatgtgtgatctctcagcgtgacattcccaagggtgtgggcatggtggagctggtgcaagcttctccctgcaggggagtctgtcagctaacttagacaccatatgtcaggctgtgtgcattgacactacccagagtggaatgttgaatcttcacaatggccctttccctcagatactgacccctagggccatttttataaatagccaactaaaacgaagagggatttgtttaaagtcatacagctagcatgagtccccacctaagaatcagagcggaagatgagaacgtcttacacgcgttctcgcgaccggccaggaaagacgcaacaaaccggaatcttctgcggcaaaagctttattcttacatcttcaggagcaagagtgcaagagagcaagagctctattgcttacatctttaggagccagagcgcaagagcgctagagtgcaagagccagagcaagagagagcaagaaagcaagaaaaagaacaagaacaagaaagcaagagagagaatggcaaaaccccgtttcttttaaggagaattatcctccgcgtaggacgtattactccctgattggctgcagcccatcggcccagttgtcatcacgggaaaggcagaacacatggcgggaaaactgcccctgcacgtgtgcagattatgtttactacttagaacacagctgtcagcgccatcttgtaatggcaaatgtgagggcggctcccaacaagaacggactcctcagagttatcctctgacctccataagtatgctacgacacacacatgcacacacacacatgagaagttactctcttctcaggcccacatcctccctctgtggccctattattcattgtcacacccaaatgtgcctcttgtcagttcagcatcagtacagaaactccagatcctacaggtagcagctggcagagtgctatgctccagctaagccttctccaggcaggtgttggaaaggtgatggtatccaagtgacaggaagaaactttggccgggggactccagggatgggccaatagatacatagcaactgcttgctttcagaaggttcacaactgtctccagtttgcagaacaattgggaagatagtgcaatgagtgctccccttttctgtcataacccatccatcctttctcctgtctccccatgcagactctgtagtcttctaatgtcttcttttttattccagcatcctttagtggtcccatctccctgaggctcccttccctgccatcatgatatttcagattttccatgttcgccttgaacgtcgtgaggtgtgtcagtcaagtataatgtagaaaaccatctcactgaattggtctgatacctttttcatgatgatgctgtggttaggggttggtgacaggaggtaccagggtcgactatcagaacatcatgccaggagccagcccatttgaagctggacagagcatcagatacagaggtagcgttaagtacagatggtttctggccttctatctctctaaatatattgaatgcttgctgataatgtctaaaaaaaatcctaaaaactttcttgcttattctatggttaaaacccatagaatggcttgggcgattaacacctgttgcctagcagcagggatttaagtaaatagtttactactatcactctcttcttggtccaggcagccagaagtctctctagctaggctgattaactctttgtgagccagagaggaaggaaaggaaaagaattaagatgctttagacaggcaggtatgcacaggcacatatacattcatatatttacattttcattcacagtctcatttacacattaacacagccacatttttgttgggtccaaccacctgtctcatacactctgcaagtattcatgtatgcttatatatacatatatgcatacacatgtacataggaacacatgtatttggatggatgggtggggcagagctccccaagccaaagcgttcaaccaacaattttatttcatttctctagcctttttataccttcttagacaaaaagttctttagaaaattacctcagagacaaaatgttacataaaatgggcatcacagaggatgttgatattaagttcaaagcactgcttcattctatatgcttgtcataagctcaaagcaacagtttttatatggccttggcttatcatattacacacctgtgatttttatccttagacctaagaatgcttttctttgaacaggtttttccccagtctatttctttttttagtgtgattatggaaactcattgtatttcttattatgcagcctttacttactatatgagggggcacattctattcttgattctaactttattacatctttctagcaaagcacctagaccatctctttaaagctttcttcctaaaattatttgaaataattaggaattctatagaatcattaattcatctaaacagcatcaattcatgaaagttcatttttctgttgataagtaagaaatcagatcaataaggtaggttaatgcccagggattattatattaatttaataatgacaggaaaggcatatcacctgcaagaagcaatcctgagatgaagtctcttcgggaccttgcagcgagctcacccatcacagaccatgaaaaaatgatgggccacctccaggaaggctacctgctatcctagatagcatagcctatcctagacaacatcagaataagcagctatttaaatagcaatatcttcaaatttatgttgtatcccagtctcaatcaatggcaataaatcttacttgcttttccttccttccttccttccttccttacttacttccttccttccttccnnnnnnnnnnnnnnnnnnnnnnnnnnnnnnnnnnnnnnnnnnnnnnnnnnnnnnnnnnnnnnnnnnnnnnnnnnnnnnnnnnnnnnnnnnnnnnnnnnnnnnnnnnnnnnnnnnnnnnnnnnnnnnnnnnnnnnnnnnnnnnnnnnnnnnntgctgtccatttctaaaatttcttgccccaggaactttcgtattttctcctttttctcatccatcctacttctggataatcctatctttacttttccccattaacaattatcacagactctcagttagttcccccgattctctccactcctctccatccttcagaaaccctcaggtaactatttttgttgttgttgtctaacatcaagactgtcttcctaagttttgggatggttctgaaagcaatgttccaggtacttagtgcagaattcaagagtctttgggcattagttccaaatgctcttgtttgcagtaaccagtactcgtttccgagttttgtagtaagtggcttatggagtctatttatctcaagcatgaattggcattttttgaagaacaaactttgtccggaagagtcaataaaatggcgtatgcacatgtgtggtgtgcaggccttcctggggatgagtttctctgcaggccatggcttttggttgggaaaaggaactactcgtgccctagtttggtgcctgctaacccgcagcatcagattagaaaagatacagggggaagagatgataccagtgtctggaagcatgtgtgggtgcttctcctttcagtggcttaacagagagcatcttttatctcactgtttctgtgggtcaggaaaccgggagcagcttcctgcctcctctgcctgaggacttctcccaggctcctcatcatctaggtgacagcttctccattcattttctcattttgatcacatcttcaaaagatctgccagctaaacctcactttctttaaacttttataacatagaaagccccagtcacactctagggatggcatttaaatgtaaaattgaattcttccttgcctgggatatctgctgtctgtttcattaggtgggagaagcaccccttgtgctcagaggtctgagagggccatgctacatcctaatgaacaaagaataaattgtccttcaaattccatctgccacttgtccacacagatccgggcttcgttattaaagtttaaagggtcacaagagtgcagacagcctgctgagggctggaagaacagtgtggaccagagactgttttcatcatctgctttttagtactagacggggagaagctaggaatgtgggagagcaatagtggaaggaacaggagccacaggtccagtcgtgcacaccgtcaaaagtttgaacacgtcacaggcttagctaatctgggaggttgacaccatctttgcatgcttatgattaccaagccattagcatctcagtgacacggggctagctagaggaaaaacagagactatgtagacatagacttagagatactctgatttcttgagctcctgtattacaaatgattttctgatagtggaacaggaaacgttagttcagaatggaaaacatcctcagagcatctgatacagtggcagctacaaccaaaccacaggcatttgtggtcttttggaattccctaccccgccgtgtggagtgcatggttcattcttgcctggttctggatgactctgaaggtgagacgtgccagcaccagtgtaaagttggcttaggaagagctgagtgttgagggcagacatttcacacacacacacacacacacacacacacacacacacacagagagagagagagagagagagagagagagagagagagagactgagactatcggttagaatgctgaagaacacagattatgttctcggaatccattccatgtaattcccagtggctttgagtttatgtctttatcttcattgtggctatcaaggaatatgcatgtgcaaaggtgtacacacacacacacacacacacacacacacacacaaatacaccctgcactgtctaatcatgcatatgctagacacatcctccacccagtttaatcctcattaattgaacatttaaggcagcattgaaacattccttttgggtgtgtgcacattatcagtgccatgactacctgtattaggctaagcagatgatatttgacttagcaagtagccctgcgatgttattttatttcattgtccctttatttctcccctcccacatccatataactaaaagcttatccttacttacactttcaaagtcatagccacctctagagaattggtggtgctctgactgggtcatcaccagcttctatcactgcttcccccatctgctctgctaatgagcccaggggcctgaggactctcccaaacctccaagttaatctagtggctagctgatggcaacaaggatgcctttaactttgactttctggtttcctatgatattcagtccagtaaagtacggaagaccacagactcagagcctgccgcagtttcagtccctctgcttcttaaagatttggctcttccatatcaccatatgtgaccccgcactccagttcgggtcaagattgctggtgggaattttgtagcttatgagtaaatactttcatgcccatgacctccatgagctcatgagtattttggaatgggagaggcatgtgcgatcggatgtgtttctcagacttgagaactgatggccgagggggacacaagatgtattcagaatgatcagatctgtgagtattggacctggacttcagacactaagactgactccattgcatcatggcccctgggaaaagggcccatgtcttactactcttcatgttttcagggcccttgaatggtactcagataacttcagctgagtgcggcagggaaatcatgatattctgataactcaggccctcctcagggttgttccagagagacttgaaacatatcgaagcatccctttgaaagccatcaagccctgtagcaagtactgggattcttcnnnnnnnnnnnnnnnnnnnnnnnnnnnnnnnnnnnnnnnnnnnnnnnnnnnnnnnnnnnnnnnnnnnnnnnnnnnnnnnnnnnnnnnnnnnnnnnnnnnnnnnnnnnnnnnnnnnnnnnnnnnnnnnnnnnnnnnnnnnnnnnnnnnnnnnnnnnnnnnnnnnnnnnnnnnnnnnnnnnnnnnnnnnnnnnnnnnnnnnnnnnnnnnnnnnnnnnnnnnnnnnnnnnnnnnnnnnnnnnnnnnnnnnnnnnnnnnnnnnnnnnnnnnnnnnnnnnnnnnnnnnnnnnnnnnnnnnnnnnnnnnnnnnnnnnnnnnnnnnnnnnnnnnnnnnnnnnnnnnnnnnnnnnnnnnnnnnnnnnnnnnnnnnnnnnnnnnnnnnnnnnnnnnnnnnnnnnnnnnnnnnnnnnnnnnnnnnnnnnnnnnnnnnnnagagacttctccatggctctgcttcagtcttgcttccagatttctgccttgacttcccttcatgatagattatcagctggaagtgtaagacaaaataagcccccccctcccagttgcttttggtcatggtgttttatcatagcaacagaaacactagctaagacatctgtttatgcatttggtggggggcgggcaatgctgtagctggtctttgcaactttgtgggttcttttccccacccttcatctcctcccagcaccccccaccccggcccccaacactagataggagagaaacaaggatagaggggagagaagaattagaaaaatccctgaatctaattttttcccttttgtttcttctttgaccgcagctactaacaaagcacaatgaaactccctaaatgaccaacagtcccccatccctaccccacctcttggggccctagcatttatataccctctgaaaagttcccagagtccagacatcacacagttgcaggaactatctgcagatggcaaaaccacacccctgttagagcactaggcaaatcactcaggtgcttcagcagcccgaagcaacctgaagcagtctgaagcagtcccacatccccaaacctggggttagaatgagaacacagtcttatagtatttctgttttctttttaaagaaactaaaattgtcactatagggtgtgtcggtggggaggtcagaggacaacttgcaggattcagctctcttagcctctgagccctgaagattaaactcgggttgtcatgctcagtggcaagctcttctatctgttaagccttcttgccagtcctccatcccctttccagtcttctctgacatgcttctggtccagactcttataatgccatcatatcctgaatcagtgccccaccctggatgcagatgtctgttgctatctcactgcagtcagatgtagtaattgcctgggagctcccaacaagtgtgtctttctggctttcgccttgacagctaatcagtgggatgtagtcctgttgaaagaccttagaatcacattttaaatgcatctaaaactagcacaaaacctgcttttgtattctcttacaacctagacatgtgttacatcataccaatcaggtcgtgcagtaaggtatgttttcctgttaaaagtaaaataacaggtagttggatgtgctgtacctggcatttatttttaggcctcataaaagtttataactaatcttctaagttatcattagtcttaagctggatacccagctctgcaaattgaatgaacacatctcacaggaagatgaggcttgaagacagatctccaaagaggtcagggcagctggggttgcacattctcagctaataacttagccatagtcgggcacatgctcagtggggctactgggcagtggtgtgctttgggggcaggtcccttgtgctttctgagcctagctcctcatttgcaaagtggaaagaagaactctgtgagtttgtgaggactcgtgagcaacaaagctccccacacacatgcattgaggtagcgcttaagaaaaccccaccctctgaacattcctttcccttctaggcctatgtagatacctggtatctttggctgaattaacgtactccagaatttagcctgttgagctgtttctccagggacagagcttggttattttctgcttatagcaagcaggagcaggagggaagcatcttgcacacaataacttgccatctattatttaccgagtgttctttctctggtggcagtgtccagtgggttggctgggctcttcctttctgacccgtctctggcccattttgttcagataatagcctccctacaagtggctccctatctgtgaggctcacctttatcaataatgggcccctggttttccctgaagacggaccccaccatcagggtcttcagagaggccttggacaatgatcattctctatgctaccatttcatgggggattcactgtcagtctttcttatgtattataccgatgctcaccctagaatccaagtattgtgaggtcagaaatacaatccacttttccccctttaaattcccaatatgaggttgataatatcctaaaaaataaacagtccttgacagtgagaagaatctttatatatgtagatgtgaaaaacgacatagataaagggtgggttggatcactgcataagagccctggctgtgcaagaatgcagagctgagttcagatcccagcacccgtataaaaagctggatgtagtcatccatgcctctaaccccagcaatgtgtggggcagagacaggaggatgcctggtgcttactggctgccagccttgctccaggttcagtgagagaccctgtctcgaggcaatcagacagcaatagagcaggatagctgacatttccgtgtggtccacatatatgtgcacattcgtgtgcataccctcctcaatgggcacacacaccatacacacatattcttacacttacatgcatacatacatgttattgtttctgtggtaaaacaccatgaccaaaagcaaatataaaagtgaccctaagactcctagcaatgggggacacagagcctgaaatggccatctcctgtaaccaggcaagacttccaatagagggatttggataacaattgagccacaatttttactgccttgacccacaatttgtactgaatataagatgtgcatgggtaaaagatggagtacaatttgagagaaggaccaaccaatgactggtcccgtttgaaacccataccacaagagaagcccactccggacactgttagtaatcttctgctatacttgcatacaagagcctagcataatttatcattggagaagcttcatccaagtactgatggatgcagagatccacagccaaacattaggcagagcttagggatcctgtggaatagggggaggaaggatcaaagggaccagaggggtcaaggacatcacaaaaaaccctacagaataatctaatctggccccaaaggggttcacagagactgaagtgccaacccgagagatcattcatggaactgacctaggccctttgcacatatgtaacagttgggtcttcatatagaattcctaacagtgggcgcaggggctatctctgactctgttgcctgtctttggatccctttcccctatgtggactgtcttttccagtctcaatcgaagatgcatctagtcttactgcaatgtgatactccaagactggttgatattcatgagaggcctcctcttttctgagaaggtagggaggagaggtggttatggggagagagggggggactgagagaggaacccacaatccagataagtaacttaattaataaaatattcctttaaaaaaagcaatttgaagagggcaggatttatgtctcttacacttcatagtccatcattgaaggcagtcagagcaggaactccaacggggaggaacctgagggcaggagctgatgcggagaccatggcgggtgctgtttatcagcttgatccttcgggcttgctcagccttctttcctatagagcccaggaccaccagcccagggtaggactaccacactaatcactaattaagaaaaatgaccttacctatgtataactccattttatggaggtgttttctgacttgaggcttccccatctctaatagactctagcttgtgtcaagctgacataaaactagcaagcacatgtccatatgcagtcacgtgtacaacggaggtataaatatgcacttagcaaatagtggcatggaattaaaatgtagagatctcaacgggaatgagaacatctaaaagcttccttaggggagcagggggagctgtaaggaaataacaagggttgaagagactgtattacatcatagaataggccccagcacacagtaggcccataaataacatctcttaacgactgcagcatacttactagctgcagatgctcaagagcagagagctgaagtgactgaccctggaccaccaagttaatagacagtagagccgaatccctaacctattcattgagtcctgtgtttgtttgatttccagctactcctcaaatttccaccacatgcttcttgaattgactggaatgtattagtcagtcccacaagaggaagtaaaggaagcatatttttctatgggaaacagcaaatgatctcagaaagtcgtttcattcggaagagccagctaatcttcttcctcggagagcattaatgacgcgttagacgtggctcatcataagtgtggagatgacttccatctccttctcaaggcaaaatcaaggtgggtggtgggcaatataattcccagtgtcttcctgtctcacagcaccagagggctgaaagaaaatactaccaactctgtttactaacagctttgataactattcatgtacaatctggggcccattgggtcctgtaatcctcttgagccttgggtttttattggccctccctctcctatttcttatttcccgatgatttttagagatgcctgtcttttatcaccacaactgctgagaacccaactttgaatagatctgatgttgtgagatgaagtataatgctctgatgttgaagttgtgagccacctcaagttagttgctagtttgtaggacccagcagatgttgctatgatgcccttaaaatcttgacctatcccaatgcactcctgggatttgtctcttacaacctggaatgtccaggacagtttgggaacagtggtagcagaccaagacatgacatgatattaccttgtggtagaactgtgttgaggaattggagaggcatgttaaattctgagacaatatttcaagttgaaatattggaagcagacaggactcatttgaaaatgttgatcaaggggcaggaggaatagctcagagggagaagaccttgctctgcaaacatgataaccggagtttgtgcctcagaatccttatgaaaaaccaagacattatgatatgtgcttgtgacaccggtgctgaagagagaggcacagatggaccactggggctctctggccatacagcatagcctcgtgggggagttttagaccagttagagactgtctctcacaaagcaaaaggataggcaacatcagaggaacatagagcacctgtggtgacctctggcctccatgtgtatccacacacatgtacacacctcgtacacacactagtacacacttacctgcacaacacttgcacatacctacctgcacacacactagcatacacctacctgcacatacacttgtatacacctacctccatatacactagtatacatctacatgcacacacaattatatacacctacctgcacacacacacactagtacacctagctccacatacatttgtacacacctacctgcacacacacacacacacacacacaccccacacacacacacacactagtacatgtgcctacctgcatacacacttgtacacacctatctgcacacacttgtatacaactacctccacacacactagtatacacctacccataaacacacttgtacacacctacctgcacactcacttgtacacacctacctgcacactcacttgtatacacctacatgcacacacatttgtatacacctacatgcacacacacttgtatacacctacatgcacacacaattatatgcacctacctgcacacacactagttcccacctacctgcatacacactagcacatacctacctgaatacacacacttgtacacacctacctgcatatataataatacacctcttcccacatcaccagacatcctcctctggtcttctacgcagcaacatgttcaattcctctccactttatcttcttgacacggggtctgccactcactggatctgaaattagcaaactccagtggtccccccctctctgactctaacannnnnnnnnnnnnnnnnnnnnnnnnnnnnnnnnnnnnnnnnnnnnnnnnnnnnnnnnnnnnnnnnnnnnnnnnnnnnnnnnnnnnnnnnnnnnnnnnnnnaaactccagtggtccccccatctctgactctaacagtgcttaggttacaggctcatgtgaccatgtctggctttttatgtggaggctgaggagttaatatggtccttgtgcttctacagtcaagagagatggagaaattggttcctatgcagttgtctgactttttgcatcttggtatcagtcttccagagccatggctgcccttcattctgcaatgcagtcaagctcttcaacaaattaatctgctagtttaaatgggcccctctactttccagctaaaaatattaagaaaaaaacagaacatccaaaggggtactggctcatcgttgcaaacctcccatctcctttaagaatcctctgatgactgttaccccaacttttacagaagtgggggctgcaggcaagcacagagagttgcagtagcatgttctgagcggtgccagatggtagactctacattgtctctgatagtaaggacggccactgttcctgtactgagtaactgctgtgctcttagggtgctgtacatattcatctctaccgtgcttggtgtggttttcttctcgcttacctccaaagttctctacggatccctcttctgctttagtaggctttgtgggatggaggcccctctggcttgcttaacactttctagtctgaagatggcgcagtctgtagacttcactgtgcactggctcatttatatattaacaccttagaaataataaagtgctgtctcctgtgctgtgtccaatccaagtatgctgttcttttagtaggagtctgcttaaggataaaactgtatccttcccactgtactctttacctaggggagatacaagtgaataaaaaccattcacagatttgatctgattttgaataccaccgtcaacctttggtgagatgtctgctttcatctgagtggctatgtggttttgtgcttgtttcattctccctccctccctgcctgcctgcctgcctgcctgcctgcctgcctgcctgcctgcctccctccctccctccctccctccctccctccctccctccctccctccctgcctgcctgcctccctccctccctccctccctccctccctccctgcctgcgggcaagcctgcctgtctccctcccnnnnnnnnnnnnnnnnnnnnnnnnnnnnnnnnnnnnnnnnnnnnnnnnnnnnnnnnnnnnnnnnnnnnnnnnnnnnnnnnnnnnnnnnnnnnnnnnnnnnnnnnnnnnnnnnnnnnnnnnnnnnnnnnnnnnnnnnnnnnnnnnnnnnnngcctgcctgcgtgcctgccagtgctatgtggtggtaagaacatcactcattttaggcttctctgattgtgcttgtgcatcagctgcagatggtccccgaggagccggagccaccgagtgccactgcctgctcctcctagcagacccagaaagccctcgggggacaggggattgtcttaggtctgaggctgaggtgtcttgcaactttacataactcatctcctcactggaggaagaataggcacttgagttcagtctctaacattgcacacccactgtatccttcaggatgaacacagttctgcccctgtttaaagcccatctcacatttcttatgtaacctttaagtcaaattcatatgacttgtggcctgtattcataaagcaactttatttttgccacttagtctctctttaaagcttctttgtgaatcaaattatttccctcctgtggataaacacagtcagaggccaagacatctctggaccctgttaggtgtcaaaaaagtcccaatagcagttaattgaaagttgtgagcccggagtggtggtgcgtgcctgtaattccagctattgagaagtagatgcagaagaatcagaagaagttcaaggacatcctttgctacacagtgagtgcaagacaagcctgggccatatgagaccccttctcctctagcccccttaaaagaatcaaacccaaagaaaacaggaaataagcaaacaaaaaatgtgtgacttctctctgaccttgaacctgttgaagacaggaagtgtacagagggaaaagaaacatgtatcattagtcagggctctctagaggaacagaactgactctgtgtgtgtgtgtgtgtgtgtgtgtgtgtgtgtgtgtgtgaagggatttattagaaagacttacagactatggtccagctagtctggtaatggctttctactgattggaagtctaagaatccagtagttgttcagtccacaaggttggatatcccggctggtcgtcaggatgagctggaatcctgaagaagtagtctccaatgacagtgaaggaatgacctcaggggtggaggagtgcaactggggagaacagatctagaacaagagtgtggtcaagatgcatctgaaactatgaaaatcttctcttgagaacagaatctcatcttgagaccagcaggagtaaggatcactccctcccaattctgcctgcccaatgaccccctacctctgtccttcttgggagagtcaagtagcctctagaccaaattacaggtgtaagcacctggaatccacctacaggcaaaataaagcattcctggcacctcagcctgagccaacaatgtacactctctcctacccaatcctaccactccccgaagtttatatagcccttgttacccctgaatagaaagagctgttatttcatggagtattgtctaagaagagctgtttcactttcccaccataaaggacactgaaaaccttcttggaaaaggagttctcctcaaaggcctgttcttttgtctggagggttcaagggtgtcagttctcagccacgtctgaggaaatcttccgtagtggctcccttctgaccctgaacatgctcagtatgtgcaaagagatttcgagagatgtctgccttgttctctttgcaaaaatattggtctgcttcatctgttggaaatttgctattccatgtgccaagccccagtgaccactttaacatcatgttgagaattcatttgtgcattcagtcggcatcaggctcctggtagtgaggcactgtcaagtgcatttttaagactaggcgcatatgtattttaacagccatattaagcagaagaaaattgaagattggttttaataacaaaacgtccaacctagcatatctaaaacttcgtcatttcaatgtgaaatcaatattttttaaattagcaaagaggtatttttttcattcttcttttcctcaaagtctttatgacacaagttcacatctatcccaccttctagttaggagcagacacaaggcaagaactcagtggccatcggaggccatagattgccaccagtgtcaactgagctgggcatactgtccacagggcataagctcctcagacagagttgatgtctgtcttgatggctccttatcagtggttggtatacaggaggtattttacatgtgcaaccttgaattgagatgcaatagaaagaataaaggaacttttggggggggttgcagaatgacttcccataacactcagaaatgaaaccacccagttctgcacatggcttgccagtacagtttgtaattcatttcttccacaggcatccaaagtccctgaagacagaagcttttctgtcttaactctctttcacacccccacagttacccctggttcctggtattgcggtgtgccacttcatgcagccaacaagtatttatgcggtgttcgtctcagaccggttactattttaagtgcagggatggaaataatgcagtctgtgttgatggagcccacagggcgaaaagaagctaacgaaggtctgtgaaggaaataaattgggtgacatgatagggtgtgacaggggacaggagcactgggtactggaggaggaggggccagttctgcaaagagccatctccttatatctcatcacagtcctccccgccccctctgctgaagggactaactcaatctcagctctgcccttaacttcctgtttctgctgtgccctgctctctctttggcccgccagtcacttttatcttccagtgtttcagcttctgggctgtcttctcaaaagagccatccctgacaaccctgtccagctccacgtccccctctcccccgccataactctgttgacaacatgcataacaccatctatgaccgtgtgcataccggaggtaaactcttggtgaagccctcttggcagttggaatcttttagtgcctagaatattcccttggtgactaatatttggccaataatcactgatcattagctatgtgggttttttttttttaatttttaaattttttttccgaatgagtaaagaaagatcactagtaaaaatctttgggaggtgttttaagggctgatttaaatacttgtaaacgaactctgggaagaacaccactttattttctgtctcctaaaagaaagacgggctaatccatctaaaagttactctttggggatgctatgggcatccagtgtcctaggaattgctttcagttccttcagcacttaactgaagggcatttctggacccctggaggaagtcaaaggaccacaggctaaacattcctgtggaaatggggatcccgattgaatcaccaagaggcaggtgttcgcggagatcatgtgtgaagtggctttgaagacccaggaaaggtctggctaaggaaggcgttggggtgggagagaagcttgtgggtcaggaaactgtaaaggaaatctgttggttcattacctggcggttgctagggacgcccgcctcctccaatcatcgttcctcttactagagtgtgagccacactctgcggttgctgtggcaacagatggtaacaagatggactcggcagtgcagcaaaaagtggcgcgcaaaaagtgcagagactgtgagttgaaacccagtttcgtcagggagcgcggtgtggagtttgccctgggattctgagtgtacagaggttaccggatctctcaatggtctcagggtgaaagagtgagcttatggggactgatgagatggcccctactgttcaccccactgaatttaggggatcttggatttctgtacttgggattcccgcctggaagctcgcttctaacttcagctttgggcaaatcgctttcagtcttccctaggaaaatggatggcaggtcccatgcccttccttcagctgttcctgccccgttctcaaaatgaccctgaagatcaaatgtgtggctaattatataaaggaaaaaatcccaaacgtgctcttcttatgcgaccctgaagcaagactgcaacagttaaccgcctctgtgcctctctgtgagtgtgcgcaattagggctcagagagtgccccaggattggagctggggaccagcgctttgtaggtctgtgctgtcctcggggccctgggttctgtgtgtgcttcaatttctggaatcctgattctgcttggggttgtttcgttttttatttcggaacattacaagcgcccgagtgttaattagacgattgtgttttagctcttatctttacttaaagcaacttgggccccacttcatgtctagtaccacctggagcttgtctggaagattgtagaacaagagttctattttaaacgagcataaacagtggagtcacgggcgtccgtgttagaactcagaccttaattaagatcaaatttgaaactagtttaaaaaaaaaaaatccaaactcatgcaggataatgagtttgtttggtttttttttttttttttccaaacccagacagtcacagaaacaccaaaaagctttcaatgtgggactccttaaggacattttataaaatgtattagacattttcccagtcatcctcacaaatcactagagggtatatgcgcccacccactgagtcattgttcgtctgtgttttggggatcccaagttcacatcagtttcttcctggagagcatccgctcatgtggggaatcacaccttgcttggctgggggctgggaggttcccttcttaccatctcgcactcacacccctgtgatttctacagtttgcacagctgtccctgcactaatgttcaccagcacaattgggaccattgatcttgctttagggcccaggctcacgcattaatgggcctgcaacgacaaccatccaactatttttaaagttacctgttttgttttccaacactcctgagtatagtgagcttcattgtctcagtttgtgcggcttgccctggatactggtgaatgcttgaaatgcccgttctttaagacttttattatcctgatgggaaaagaatggcgatcactttatttgtgtttccctgattgctagtccaatagagtagtctctgactgttcattattgacaacggctctaatgtgaatccgctgccttttaaaatgcagatgccctttttcatattgatttctagatatccatttagttctagtgtcaacttgacacagcctaaaatcacctaagaagggaatctcacgattggcttgtgggaatatctgtggggaatcatcttgagcccactgtgggcagcaccattcccttggcagggggtcctgggctgtataagaaagctagctaggcatgagcctgccagtgagccagcaagcaatgttcctgtatggattctccttcaattatccatctgacttctctcagcgatgggctgtaacctataaactgaaatgaaccctccccctctaagttgcttttggtcatggtattgtcaaagcatcagaaaaagaaaatggtgcaccggggccattgtccatacgcaggatactaattcactgtatgttgcgttgagataaaattaatatttcctccctgtacattgatcatagctagcttcagctgtcaatttgacacagatattcatttatctgagaagagggaacctcggtggaagaattgccttgatcagattggcctgtggggcattttcttaatcactgatgtgggaggggtctaatccccatgtgggcagtgctatccctaatagtcatgcaggccctggctgtaaagaaagctagctgagcaagccagttggcagctttctctgtggttcctcttttcagcctctacccggcattccttgatgacagactttagcctataggccaaatacaccctttgtgcccccgaagttcctttgggtgataatattttatcacagccacagaaaccatgctaggacactcttcttgctcttgtttttccaggaagctgtgtttgacataaataacccataaatgataactgttctttgtgggcctataaaacactagtaattatgtcacacacttttaaaaccaggtttattgacacatagcttgtactcttaaaacgtctgccatttgtctgtacaattccataagctggtttcaaaaagataaggtctgtgtgacaactcaacccaccacagtaagtatatagaattatttctagtagctcagacagttctcttgtgtcttgttctagttggccctctttgtgacaatgatctgatttctgattctgtactctccgaataatggaatcataaaatatgtaaaaccttctgtctgatttgcttcatttagcgcactgtgtctgaggtttacccacgttgttgtaacagtaggctattcctttttattgctgaatactgctctgttggattggatataccaccaggtgatgggcatttggtttgctccaggtatctgaccattatgatcactcacttacgtgagtctgtcacaatcagtcatccataggtctctgggttgctgcatattattaatgttttagtaaataattggagggtttctgggttatactgtaaatatgtcaattttacaaggtctctagccgtgtggctcttaaagtgagcataccgttttgcatttacatcagtatagagtttgaggttcatgtgttctacagccttgagggccgggatgatttggttactttcagccatccctgcaggtgtgacatgcatgcacaccacagcatgtgcgtggaggccagacaagagctttcaggagtcacttctggtcttctgccttggctgctgggcactaaacccagatactcaggctcccatggctctacctggctgatccacctcatcaattctcctgttctagttccagttggcattcttcgaggcctacgacactgaacaacatccacttacctgctgttaaaccgctgataaagatgttcactgacctcctttgcttcatatgattggcccacattttatttactttcttttttaatagactcataagaatatgattttacatattgatatatgtaaatagaattttggttcagaatttttctagactgtgtgtgtgagtgtgtgtgtgtgtgtgtgagtgtgtgtgtgtgtgtgtgtgtgtgtgtgtgtgtgattgtgtatccaaccaactcccaggatgaacctaaactaatacagccagggaaggggtgttcagactaatcacagccatcttgtttggaccattggtttattttatcaaccacacttatatcaactaccagccttgctttttagcaccaaccataacaagacttaggtttgggaccaacagcggccttatctcttagcaacctgacacggtagccctcatgataggaagtgctcctcacccaggcaaggctgaaatggttccaggcccattcttgtgtcatagccaagagccctgtaggaagggtttccaacagccctgcctgggtctgtgcccgcaggagccaggatcatgcactgcactcatttgtatggttatctcaaggcgggcatcatgtactccatatggctggggatggtacagggaagtttggctgactggtcaactcaatgctcctttactcaannnnnnnnnnnnnnnnnnnnnnnnnnnnnnnnnnnnnnnnnnnnnnnnnnnnnnnnnnnnnnnnnnnnnnnnnnnnnnnnnnnnnnnnnnnnnnnnnnnnagagagagagagagagagagagagagagaaagacaacgagagagaaggagggggagaagggagagggggagagggagggagaagagggagacggagacagagagagacagagagagacaggaagactttgaggagtcaatattgccaagatgttagctcttcccaatctatttgagacagatggggttgggagcattatcaaatggtaggttccttaaactcaggtttgtaagcacttctggtgtttattttcctgtaaataagcaaaaacactagggcttgaagccactgggtgccctctctctctctcctttctctgtctctttgtctttccccccccccattcttcccgggtgagtgtgtgtgatgacaggagtcagttctctccttctaccatgtgagtcctgggaatcgaactcaggtcatcagacttggtggcaagctcctctacctactgagccatctcactggcccttgataatttaagatgtccagtttctaatttttcatggctggttatcaacttggtgcttcaaactttgttaactcagagttagtagatttggaggtagaataatttcttttaaaaatatttacataatggcatagaagagtgagaggattttggtccaccacgttgggtgctcttcagggttgatactgtcacaaagcaagtgtctccaaatggacagccatcaatattatcatggaatgtctttaaatcactgttacagtagacccagatcctccagaacggtagctagtgctcttagccttctctcctgccctggacttacttttatatttaacatcttccacactcttgttccttcttgtatctttccacctggagctataccatccccccccttttttttttacttgcaatacacctttaggaacagcttcaagtatgctaaatgtattatcctatagtcttcagttttcctgtgggacacctagatggaccctccttgaaattcctggggcttactggatcccccccccctttctcattttatttatcatgtgtacttctcacaattcttttagcaggatcctgtccttggggggatgtcctgtgctcgtttgggaagctagatgcatgtcaaggagttaccgtaaaatacatttctctatgactgattgccaccggtttgtatgtttgtcttatcttcaaataccacttctgcctcggcctctctcctttcctctccagaatgtcaatggcatgtctgaggcctttctgaagtcgcctacacatctcttaagcatcattcttttattttaatcattgaaatttttccttagttttgagaatttcatactgtatacaataaattatatggccatatatatataagttccccatctcctcctgcaacttgcttatctatctatctatctatttatctatctatctatctatttattttgataacccgcctacacatctcttaagcatcattcttttattttaatcattgaaatttttccttagtttagagaatttcatactgtatacaataaattatatggccatatatatataagttccccatctcctcctgcaacttgcttatctatctatctatctatctatctatctatctatctatctatctatctatctatctatttattttgataacccactagatagtgctgcccataagtgcaggggcgtggggtcacccactggagcacatgcctctgtgccttaacaactgattttcagcttgagattcagacagaatttccaacaattcctggaatggccctaaatctacgccgagctccatatttatacaaagggtcttccttagcattggcacctaggaaacgagaccatcagtcagccttgagcaacgctgcatgccttcccactctggaaataaaaaatcacacccaccgcactaccaccaactctgctttcgcctttaataaatggtaaagctagatgcatgtcaaggagttatcgtgaagcaagtttccttacaattcattatcagcggtctgtgtgtttatctcttgtacccacatgcatacgattgtgcggaaatttcccaggtgaaaagggtttgcgagtgggaaatatttaaggatccctgttctgtaccacacggtaggacagagctccacatctttaaaagcaggaggctgggtgtgggggatgtacctgtgaactcagcccttgggagggctgagcaggatcaaaagctcctggggagagtgggatacctatggagagctgtccaaccaaataaagaagagaccctgattatgtgtgcgtaccctcagaggccagagttagaacaggagtcacagtggttgtaactccagtcctttgcaagagcaaaaaacatcctaactgccagttgctctccaggccatgtgtctgtgtttaaagtgccactgctgataaatacataccaaatgcattcattaaaacatttatttattaatgtatgagtacactatttgcatgtacgcctgtgtaccagaagagggcatcagatcccattatagatggtcatgagccaccgtgtggggcacaatggatagcacattggacttctagacattcttattgtgattaggacttcttgttgtttgggtttttgattatgatttgtttaattttaacctgcaggactccctttctgtgctgagtttcactggctcatctcagggcatggtagctctcttcatgagctgttcatgttgacagcaagccacgccatttctgcagaaaaagtatttatggggagttctttggtgactaagacagggcagatgtccagagggatttgcatctgtctgtgcttggcatctggaggaatgacctgtccagactccctgtaaagaaagcaggaaagcaaggaaggaagaaaggaaggaagcaaggaaaaaagggagggagggagggagggagggagggagggagggnnnnnnnnnnnnnnnnnnnnnnnnnnnnnnnnnnnnnnnnnnnnnnnnnnnnnnnnnnnnnnnnnnnnnnnnnnnnnnnnnnnnnnnnnnnnnnnnnnnnagggagggagggagagagggagcttcagagtccatctcacatttggatgcattgagcatcttcacatgcaatgaagctggaaacacgaagggtttccaaatgccagctgggaaatagacgtgcgtacacagggagctgttttctgctcgtgtaaaatgggtatactctctccgctgtcacacttagcagcctgaacacaaaggctcgcccgaaaagctcttcaaacagcggtgcttggagggtacacagtgtggacagtcttacgtcattgtttggtgacgttagagtagtgtctctggttgtgtgagaacggtccacgcactcatcagcaggaagaagtaatgtcactgaacactctgttagcgtcatgggcacctggcatagttttgagattgttcctccaatcatgcaaaatatgaaaactctcctctagcttgaaagtagccctcatggctggttagcttttgagggggtgttttaattggtccacatttgggaatgtttagggactctttacatggattctagcttcacatgcctctttaaggggttagtgtccctagcctccttcatcggattcccactgaagcttggaccaccgaggttaaaggtcatcgctttccctactctcgaatgcagcggaccataatccaccccatcagccacatcaccatcaccaaaagtgaaggagtgatggctctttcctgggagcaaacccttcctctgcttcctcgttagcctggcggaagcactcagcatccagctcctcatagagatggggtttgaaacgaggcaggaggaattgtaggatcctggcggggagatttcaggttgcacggaggaggagtcggaaggaattgatctggtacagggctccgctggtttaatttgaaaaaccaaaccgtgcagccctttcatttctttgaggatttaagttctttagtcctttgatttttttttttttaaggctcatatttatcgctgaagatagtggggaagggaagtggacttgaaagtgctctgctctgattaaaaagattgtggggaagtctgtgatattgttcacgtggtggtcgtcagcttaaatccattaccactgggttgtgtgtgaggaaaagaagaaagaaagacatctgtgtgaaatgactggagaaatctctcacaatgtcacccgcagatcttaaaccctgacctttttctttgaaaccagttttaataagaatctaaaacgtcctgggtagaagataggatgatgatctgactctgttggcatcttgtgtttatttgcttaatctgatatcctgggcacctttgcctggttccaagtttagtgccatgttgatgatgatgatgatgctacctccttccctcttcctcctcctcctcctcattattattattattaataaacaaaacacctaatttttcggcagtggcgtggaaaaatctctaattaaaataaacgtcaaggttaagctgttttcacatctgaaaacaattcccagcattcatagcttttaaaataaggacagcaagacaaacatgacaaccaataccaggaaagcagaagtcggcatttgtgaacgccaaaggcaagtctcactgcactatggaacgcgccctgtagttaattatgggtagcgcgtgtcttgggaagctgccaggatttggtgggaagtgcaaagaaggggctcccacccgcctcatcgctcctctaatcccctttactctcagggaattcagctttaataaaaaggaataaccagaggatgtaatcgaagaacactaattaataattggagctcttcctgaatgaggctctgcaatacattgtaggccgtcagttgctaaaccatgaaatgttgcggagagagaaggggcgccacgctcttccacaatgtggctccttacgttggaactgttggtggcagggaacgtggtgttggctaatcacttgtgtttttacaacgctgtttgtcatcacaattaaacagatggttttgaaaaagctagtgtgtccttgataattaaaaccgcagcaagccgcttcttcctccccctaacatacaattacactgaatagaatcacatcacccagggcttcttcagaagaaagggtcttcacgggcacaagattagtgctctatcccaagccctggcatcttgacctagcctggagctttgcagctggcggagagggctttcaagcaaacatgggtcaccccctcctctgctttctctctagatcttatccctgccatgcatggattcatgactatatttcaaaatggaatcttaggaagtctcacaaccattgagtgcattgtgtttataacagctgaactctgggagctccgccagcatgtgacttacatggaagtcctcaggggtatgggaaaagccatcttactttgaaaactaatgtggatgtctctttgctttaaagggggtgggggaagggaaacctttcatttctcagtgtgttatttttttcattactgtaactaatgcttggggtaaatcatcttaaaatgtagaaaggttcattgttgttgttgttgttgttattgttggttttgacctatggttttggaggtttcggtccatgacagattgactttgttgctttggtcttcagtggtatcaggaatgtgtgatgaaattctcaccttatttattgaaccctaccacaattaattagggttttttttttttcagaaaagattcctcacccccaagaagtatttaagcagttgagatgtggcccccagtccctcccttgaactcgacctcggcaatgtgaaccacaaagccctgcagttggaggctgccgaggtctattcacagatgaaattttggaaatgtgttttgtttgcctgtgcataaatacgcccaagcatactatcgatacttttaggtacaggcttttgtgcctactggtaagcagtcatttgccggggcaattaaccatctgcactttattatcagggtgcagctggctaatgatgctcnnnnnnnnnnnnnnnnnnnnnnnnnnnnnnnnnnnnnnnnnnnnnnnnnnnnnnnnnnnnnnnnnnnnnnnnnnnnnnnnnnnnnnnnnnnnnnnnnnnnnnnnnnnnnnnnnnnnnnnnnnnnnnnnnnnnnnnnnnnnnnnnnnnnnnnnnnnnnnnnnnnnnnnnnnnnnnnnnnnnnnnnnnnnnnnnnnnnnnnnnnnnnnnnnnnnnnnnnnnnnnnnnnnnnnnnnnnnnnnnnnnnnnnnnnnnnnnnnnnnntaacagccgaatattggcaagaagaactctcaggtttatcacagatcaaattaacagccggcgctgatccatggatagcaagtgtcgtttaactggagacttacaagaacctgtcaattgaacccactgcgccgtttaatctgtaagccttcactgtgattctggggcatttctgccccagtgtgctcttgggggaaaacatctccaaacttaccccagttcttccgaaactagcatacctatttgaaatatttctaccagggacccactttagaccctaatgaattagcatatggggtaggaattggggctcttgaagtaaggccaccttaggacaaagttacataatttctagggtgtgttctaagttctgagaaaggtttaattttaatatgaattctctttagaatttcagttgtgaaatactacatgtgagcatatgaatcattcatagatacagacacacgcatgcgtgaatacatgcatatacatgcataacttgacaacagtcaagaagggctcaaaggtgcatctttcacctggtcctaaattaagttgatactatcccagaaatatgttttttttaaataatttatttattttaatgtgtaccgtgggcatgcaattcccatagaggcccaaagatggggatcgtattcctgtgagctggaattgcaggtggttgtaagatggcagatgtggacgatggggaccaaactgaggtcctctgggaaagcggcaagcacccctgaccactgtactagttattctttcattgttgtaataaaaagccatggctgaggtaactaacagaagaaaagtgttaattggagtttacagtttcagatgattagggagtccatgacagagtggagctgtggtggcaggcagtcggaagagcagctgagagagctcacatctcaacagcactaagcagagagcgctaactaggaatggcacaagtcttttgaaaacgtcaaagcccgcccccagtgacacacctcctccatcacagccacaccttccaatccttcccaaacagttctaccaactggcgaacacatattacatcatgagagcctacgagggccattcttatccaaaccaccacagtcactatgttcgcagccatctctccaacgcaggtagtccagaaatattttcctctctttccctcacctcagagatcactactctcctgacccatatgtctgctactgttgatttctcatggctttcctcttatgtatacagttcttgagaacagggttccattttccctccccttgagtgttatgtaaaccagaatcatggtgtgtatgtgtatttttggttgagtcttctttttttcaacttcctgcatttgttgatcagctgcatcttctctacggattaatgtgatccaggagcaccacacattgttctgtgttttgtcataaaagacacaggttgttcccagtacatcagtataaaagaagtactgctgcgggcagatttgctcagcatctgtagaatatacatttcactgaattatggaccaggcaagatccctgggtcataaaacccttaaatttacgaggtaataaaatgccagttttggatattgtctcgttcaggtgcagtcccaccagcaagtatttagtacattttactacaacacagagggggtcaatattcaacagttaccagtctcaaattttgcccatcctgtggtttctttcatactaccttgtgattcttattcactttctctggttgtattttggaatcaccagactcaaattttgctgccctagtaaatatgtagtggcttattataattctagttgtgttttcctgatgactgatgaagtccatcatgtttcatatatttattggtcatttggattggtcttttgcctgcctttccccctactggatgtattttttaaaatgctcttttatgggagctctttaagcgttctggacctgagggaggttgtgttgttatgtgttgcaaacacttcccatttgaggaggcctgacatcccatccttatgcagagtcttttggtaagatgggatttaaccagtgattccgagtggaagccatagagctctgtggatgctcccctgtgttagtgccgcttatgatacatgtttacagctcctcactgttaatgaagaactccttccacatcaccttcccaacagtttccctgtggcctttcccctttaaagttttgttctaccatgagttacacgtacagttaagaggtttatgaaaccccgtctcaaaaaaaaaaaaaacaaaaaaaacaaaaaacccaaaaccaaccaaccaaccaaacaaaaaggagagtgactgtgtgaaacactgctgtattagcttgtggcttccataagcttgcacgagagcatgcacacgcacacacacacacacacacacacacacacacacacacacacccctgaaatatacaacaatttcttggctccatcatgtgtcagtcaccacctagcaagctctgactctctctttaacaactggttctctataaagctctgtacaaaatatgattcatgcgttacatggattacccctcagagctcactggcttctcattcaagtttgttgcttagtttccctttaagttgtgtaaggagtccagccattttcccattgagactctataaacagatttccattggtttttgcctttggtgtaactacaatgtaacacttcgctgtgctttctgtaaactggggtttgatttaaaggctctatcaaatttccagttggcctttttatttttctccagaataatctgacatgtttacctcctatctgctcacatcatgttaatgatcttaagatcaattatggggctcgagtgttaccagcctggttgtgatctcatccaatggctttggcagaagggtttccgtgagtctggtggagtgtgctgtggtaccagtacttgggcatttcacctagaatttttctatataaaatgacctttttttttcctcatttactatgttccctctatgaaatatatgccaacaggatgaaagtaacgagttcctggctccctgtctgtctttgtctttcctgcacacacttaggagcttagtttctttgtgaacctgcatctgtgtatatctgagatgcccagttttggccaagagaacaatgttgaagtcaggttgacctcaatgcccctttgagtggtttttgttgttgttgcagttttatagttttatttatatctgtctgaagatgccaacggagaccagaagagagcatcggatcccctgaggctgcaggcacaggtggcttttgagccccacaacgtggtgctgagaactgaactttcatctcctgcaagagcaatatctgattttaattactgagcgagctctctggagctcctacaatttttcaaagttaaaatataattagatcatttcccctttcccttgcttctagtcactcacatgccctctcttttgctcccctttccttaacagttatcattacatatatgtgcgttacacataaacacaagctgctgagtcccctggctgtcatttatatttatatgtctccaggactgatcactgctattggataacaagttaggcagcttatccttggaggggattgattaccccctcccagcagttatttgtctatagctctttgtctaggggtgggggcccctgagagcaccccttctgtgttagcatgtccatggctgttgtcactgttcagggcttatttagacagtgtcctggttgactttttgtcaacttgacacaagctagagttagttatctgagaggaaggagccacagttgagaaaatgtctccatgagattagcctggaggaaaacctatggaggaatcacacttaattagggatcggtggggagggacagcctagggtgggtggtgccacccctgggcaggtggtcctgggttctatgagaaagcacactgagcaagccatagagagcaagccagtaagcagcacccctccacagtctctgcttcattttctgcctccaggttcctggtctgccctgacttccttcagtgatggactgtgatttgaaactgtaaaatgaaataaatccccttccctctaagttgctagtggacaccgtgtttcaacataacactaaaaaccttaactaagacaggcagtggtgatagtctatctccccccacccacccacccacacacacacacccctctgctccccatagctcctgatggctttctgactttcaggcatgagtaaatgtgttagacttagcttattgatttcttgacccaggcaaggctctacaatacgtgttcatgtctgattgggcaggacaccctacattgttctcttggattccctccagagacggggcctgagtctagaaccttgtggttactattttgttttttagttaagggataggaaccaggctgaaatgtgagttagggaaggaaataaaaccagtttcacagtgtgttgtcaagaatggtctcacagaggtcatctgaaaggcctgttacaaggtacctggagattgtcagcctggaggctgaaagagtggaggcaggctctgtgcaccggcatgtctctctgccaaggtctgtcgcctttcacacttcccagctgtgctggtgtgggggctacgtgggtcagagagctactgatcttccgcgcatgctcattcagctcattcaaagccccgcacacagaccaccaccgtgtccccccatttcttcctccatcatgagtttttcatttgagatcactttccttccattagactttccttcagtgagaggctgctagggtgagagttcctagacccgctgcttcaaactgtcttgaagttgccctggcttttaaaagacatttttactgcctttaaaattacaaggatgacagggcctttttgtctttttcttttttaaaatgtccctttggaagcaatctgattttcttttcaagatttcgttttattatctttgtagtgtgtgtgtgtgtgtgtgtgtttctggattatcaagcatcccgagggcacacattgctgtaatgttccagtactttgtctccttctctagtgcttggtttccttgggcagttgctttcctgtcttgaatgcttttgggtgatgagattgttttcattgggagcacttgattgtgttcatatagatggttgggttagctaatggcttatatataccattactgggaatcaaagtttcctttaaattcaaggtatcttattgttgttcttgctaggcacataggatggatacaaatatttttcatgctttccaaataggatcaatctagccaaaccccacaaaggagccacaataagaatttcttagtcaataatcactagtctgataacagagagaagaaaaatgaccccattgcctttccagacaacttgggtatagtgttacagtgtgtaaccaatctctgtcactgggtttcattactgaactctgccgtgacagccatccaatatgaattaaaagaattgcatttgacattttaataaaaggtagaaacgctacatttaccaagcagcagctagcggggatgtacccaccagagatgagcagaaggcactcaacagagaggggtcaaatgagcttgctgttcacttgcttctgggaattgttgaccgacagtcccagtggctggagagggctgatgaaagcactggtctctttctctgctgatgtcagtgggagccatagacagggtcaaagagtggatctgagtttgctcttctgtacaaacacagtcttctgaaatacattctgtggaaggaattctgattgtcaggcactttgggggctatgacaagatcactttttaataatgttcgcaggttgagttatgagttctttgagaaaaacatatgtgaaatgcatgagctttctgatctttagaatctggaaatgaagcattcctctctaggctcacatagtccatgaacttgaactcacccatccaaagaccagaaatctctggacccttgtgaccttctgcaagcaccttttgagtgctcgttatattcagatgtgggcttcataaaaacagcagaattcatgtgcggggttaacagttctgggtcatggaatgcagatacttagtctctcccaaattccaggtttctggtcattgtaatatgcacctggcacccttaacacaggttgattgatcttggaatttcatatagttccaataaggtataagcttactctctcctaattgataatcatcttcaacttgcttggagatagcagttcaggttactcctctgaactagcagtttgaactgttcaaacttggaactagcagtttcactacaatggctggcatgctagctcagaaaaagaccctgtgtccttaagttcggtggagagctgtaggggaacacacccagtgttctttagcctctccatgcacaaacatgcatgcacaaacatgcatgcacaaacatgcatgcaaaaacatgcatgcaaaaacatgcatgcacatacttgcacacgagtaaatatacaccctcccaacaaaatctttaaaagctgctatacagtatttcaaccgagagtgcaattttgaatccaagtaaaatagagtaaagaaaattattgtaaactcatttcagcataggaaaaggtatttccccttaggttagaaagtgctaccaattataagaatgtatacagcaactagatgcaaaagagaataggttaatgaaagaccaatgtaagtattggaagaagggaattaagatacctttgcttagatatttccccctcaaagccactaagaaatattaggccagggctagcaagatggctcagaggacaaaggtgcttggtgccaagcctgacaactcaaatttaatccccacatgatgtaagaagagaactggttgttgcaagttgtcctccgaatgccacatgtgatatacatgtatgtaggtatacatgcacagacaataaatgaataaatgtaaaaaactaagaaatggttattgctaacctagcagatgatagtttttgtatctgttgttgatggtaagatatgaagaagctagcgttggtttgatatttggatccagagaattttgagtgtcagcgaatggtagtttgaatatctcttcattgcggtagattttattttcaacaaatatgatgtaaattcacaggactcttaaagaataggtgagtggtgtgtgcgactgcacccatgtgtagaaatctggcttacatgcatgctctggcctgacagctccttacctggacatgtactctgcatgtactctctctttgtggagaggtgtttacaaaaatgtgtatggcattgtaatccattgtgtggaaactacccaaatgccaacccatggtagaatcatggacaaagtacagtggacaattacatgtaacttacagtgaatacagtctaactatatccaacacacacacacacacacacacacacacacacacacatgaattaggtatagaggctagacacagacagggaagtatgcacattgggtaattccatccttttaaatattaagcaccagtcttaactattacgctcagggatgtatgcttaaatcacaaaaaaagcagacactacaagagcgagatttcctgcgattggtagaaagagcatcaagatgaggcattgcagtgttttgtttcttcctctgggtgactattatacagtcccaaccaatgttcaacataataattcattgggttgtgcatttgtgaggtacttttctttttaataatatttttgtttatgcatttaaattttcatacagttttgattcctatttattctttgtatactccatatatgtatacaatgtctattgacaatatctacccttcacttctccttcaaaccccattatatctgcctgcaaactgcaagtcctggttgacttataccctggagtccaacaagtgacacccatatatgtctgactgagttcatccactgaagagtggagaacctaccagtggccacactccacgtgacaagtggcccttccctccctagctgcagtcagctgcctgtagctcctcaccgaggggcggggctttggacaacctctgccatccaggctgcaattgttcaccagtgttaactagagctgctatgcattcgtgtgtacaatagtcatgtccagacagcattgaatagagctcttcccatcctccaggtcttacactctttccactccctcctcaacaaagtttcttcgagccttggaggaagatgggggttgaaggcccatcaatggctgaacactcacagtctattatttttggccttttgaactgaaaagatatgtctgcattcatcgttaacactgtgataagaaatgcctcttacggatacaaacataaatacttagaaggcagtttgacaacatggccattttgaagagcagcatgaatatatccttctctagggcccatgacttccgcagcattgggtttgggccatgtttatattacaggcaagcattccctcctatagtgcaggcatcgggaactgtagaaggtcaggtgtcccaaaattagccccctgcaaactgcaagtctaagaaggtgtgccttggaagcagaatacagggcatccattccagtgggatccatcccagtgtacatctggaagtccgaaaaccaaaagtaccgacaggaagagagaggatcggcgtgccaggtcagagagtcagtctgagggggcaggtgggttctttctccacaagatttttattcaactgaaaccctcagtgtgctagatgctgctcccttcccagtgctggggttacaggtcctcatgtcctcatcaccatgcgtggcttttacacggctgctgggacccaaacgcagatccttaggattgtgctgcaggtactttatggacagagccgtctgcccagtcctagaactacagttcttatcatcatggtattagccattaaattctatgcataaaatgaaaacaccagaatgaaacagactaccttatacagttaatctaataaaatacaaaatttctaaatgatgcaaatggggtcgcagagcgcaggaaaccggtttggcagcttcctttccatcttcctgtagttactttcttcctatgggacttttagtttgctgtttgactttcccattgggtcaggtctagaagcttgcatagtttgaacaagttttcaacacttgatattgtcctatgaaaaggtagttcttctctgtaatttgaccttggaaaagttgctttttcttatacatccgaatctcacttttctcccacgtggggtcaaataagaggattccttccaaaagttctctctttgatccacctgagatgcaagaagtcacacatcccgcagagacacggtgttttcaagaattatttcaaggggaagagagcagagggcaacacgaaactggtaacatgtgaaataatccaatttttaaagagatcaaactgatagaaaaccaagaagcaaagcagctttagagatgtcagaatagcaggagatgaagcaggattataatgggaaaattgatcttcttactcagtgagtgcccaaagaactcccaactcacagcaaatgccatgttgtattgacttcagtattttccacgtgacactttgctgctaacagtatccagcatcacatcccactgtggaatagccccgcccccactgcatagggagcagaggctgaagatgtgggagcatgggtcaactcccacgtttacatccagcaagcacgtcgaacagaattttcttccctttagattttcttcttgttttggctttaaccaaactgtctgacaatggtagggccaagaattatatgccaggttctgagaaaagagtactttacaaatgttatcgcacttaatctttttaataattacctgaggtagctaggtcatttccaaaaccatgctcattttcccagaatcctgatattgatgtacagatgtgatctttcttttttttttttttttttttttttttggtttttttcaagacagggtttctctgtatagccctggctatacactctgtagaccaggctggcctcgaactcagaaatctacctgcctctgcctcccaagtgctgtgatctttcctgcagtgaaatgttatcatcttcgtggccagtagatatgtaaatgattgggtaccgttcagattgaaaatgacattgtatttatgcttctgtgtgacctcctacattgcttcctttggttctagccagtgtgtgtgctttgggggaccttcgtgcagtcccaatgagaggtccatgagagatagggtttgctgcctggtagtgatagccaggcctgaccttctagccttatgagtcagccatcttggattttccaaccctagtgaagccttcagatttgcaaccttagagccgtccttgactacaacatcacaagagaacctgcgtcaaaaatcactcaaacttctacaaagccttttaggtcactgagacttgggcgttggtgataaacctagttaagagtcatgtaagcagtgttgttttgtcctgtgtctgggagcggtctgttatgtggcagctggtagctatcggagtagattctgttgtcattgtcctctccagggtccaaggagattacctgccaggtttaaggactccgggaactttgggcctagtagaaatgagatttcatcaggaatttggtttatcattggtaacagttattttttatttctgaaaagaaaaaaaaataacttctgactagagagaagcatttttgccagtcaaagcttctgtttgttaaaatgtgctaaaagggtgtgggctagggaaatagaatataaatgtgaaaggcagtgcttgacaccaaagatgtttcaaatttgtttacactccatatacttctcgctggctagaagggatattttaacatttctgagatttaatttgggaggaaatttaccattttctgtttctctttttccgagaagatatggggtttggaaatgaaggatgatacaggaaaggcagaaggcaatgctctctgaggcagttaggacgaaagagaagtcacagagatgacggatgaaggcgtgattatggtgatcatgatggttattaatgtgacaagcacacagccgagtagcatctggagacattcaccaatttaataacacacaacatgaagttctgctttcccaggcggccatccactctgatactgaactcttgtagactcgactctaccgagagttccaaggagtgaagaggatataacgccctgtagaaaatggattttgtgcttaagagtatctatctattctcaaccatcaacaaaaaataaaataaaataacagaatccagtggtacaattatacaaacgtggcagagctccagtagaaaatcccaagtcccagttcctaagggttagttgggaatacgtttccccatctctgctttattctctgaaaagaagctattaagtcacagaaagggagcacttactcaacccgaactctgttaggcagaaatgctcggaggcgaaagttgacatttaagttaagaaagacaaagcaaaaggttgaaatgtttactctgagagatgtctgcgcctcatgaaaattctttgagtgggtacaatttaatacccacccagtggggaagccatctactgaatcccttctaggtgtgatgtggtctccagagtcagagagcatatgttccagagccatagacatgtccttacgcaaataaactcaatacagtatagttaataatttcatttagtgcctgtagtaaccgaggtatatgcaggacagattaatttgtactctttaaatctaccaaggaaagactttgttcccgagatctttggaggtggcttttataggataacttgaagttcgctaggtagatgggaatatggctatgaaaggaaataattgatctgatatagaagtattttgctggttaatcaccacagtcaaattgactggattccgattctcctgggaggcacactctgggcatgtctatgaagatgctttgagagagaattcactcacttttagcgtgagttgtacagcaccatgggatgtggtcctggtctgaaggagaaaaagcaggtagatacccaaaggccctctctgatttctcagctgccaacacgatgtaaatgtaagcatctatcttgcaggcacagctatctgcccccaccaccatgtcttcccaatcatgatagactgcatccctttagaccatgaaccaaaataaggctgccttcctataaggtgtttcttatcaggttttggtaacagcaacaacacgaataaatgacaaaagaaacgcatataaaaaagttgctgtgataaacctgaccacctctgatgccaccactggcctcagataccagatgcagagcagggtttggagtttgctctgtggcgtttggtttttttccccgctgggtccagctttcccttgctattgccctaatgctccttggttctcaggcttttggaacaggttttaagaggtgtgtggagagtctggagctgtaggctagagaagccccagaatgccagagtggagatcaataggccattggggaggagttgagaagaccagaattctgagagcaacgtggaccatgctggcctggctcgtggagtttcagaggggaacgaagatttattagaaaatgtgcttgagagatttatgtaacgtcctggcataagatatttggcattgctctgcccacgccatgagatctttcatgaggctgaattcagaaggaatagattgcgttgtttagtggagatttccagacagtggaatatccagaccatgatgtggttactcatcactgctcatagtcagacctacagcggcccagcagaaagatatcaaaaatacgctgttcagtgagaaagggtgcacgcgtgagtataaggttgtaaataaggtaggtgtaggagagacagctgtcatttttaaagagataggtgacattaaagagaactttggtggctgggacaataggaaagctgccttgaagttaaagccacatctatgaaagctcccaatagcaaaaaagagaatgccttcgcaggaataggtggaagtggagatgctgcgaagggtttccctgctcaaaggcaaccgccaccgatggagcccttcccccaggctcagccatgaaggcaaacagaagcccctggtgtgctagacgtgggctcggctatgccttgatccggcagcagaatctgccagtgccgtgcatgtgctgcttcaggggcacgctgctgcatgggagagttaggatgccacgcaggcttgcatcgtgcaggcttgcgccaaggtcccagaaagccactggcaattggcagccaaggagatcacggagaggggcagatctaggagagaggccgaactggagaggaggagataaagatggagccccaaggatgctaccgccagcctcagataccagatgaagagcggtgtttggagtttgagctgtggcctttggttttccgctgggtccagctttcccttgctgttgccctaccgctcctttagaatgggaatgtttgctctgtgccctgccactccgtattaggagtatgtaccttgtcttcatgtgctccacctgtgtccactcgcgcagcgctgggatttcaggtgtgcgccattgtgcctgctgtttgtttatttgttcctttgtttgtttgtttaaattttttatgtggtttctggagattaagctcaggccccatgctcgtagaacacactcttcagtgactcagccatttccccacctggggtggtttgaataattttggctcccacaggtccatgtaattgattgcttagtcaccaggaagtgacactttttgaaaggattataagggtttggagatgatgttgaggaagtgtgtcactgggggagagctttaaagtctctctctctctatctctatctctatctctctcactctctctatctccctctcctcccctccccctcccccctcgcctccctatggatcatgatgtagttcacagctactgccccagcacctgcctgtatgtggccatgttcactgccatgatgacaatggacgaaacctatgaaactgtaagccaacccccatttaaatgctttccttttataagagctgccttggtcgtggtgtctcttccagcaatagaacagtgactaagacattatccttattgctatttttaaatataaaaaattgaaaatatgcacatttcagaaagtatattatgagctaacttcagtattcacaacatcnnnnnnnnnnnnnnnnnnnnnnnnnnnnnnnnnnnnnnnnnnnnnnnnnnnnnnnnnnnnnnnnnnnnnnnnnnnnnnnnnnnnnnnnnnnnnnnnnnnnatatataaacacacatcataacacacatgcacacaaacatacacagaaacagacacatatatatacataaacacacatacacacacacacacacaagcacaaatagacaaactttttttcctggagtgttcttttaagctcaatctcagacatgattcctgtttacctacaaactttacctaaatattactaatagataacaacttccttacaatcaggttgaccctcgtataatttatctaacaagttttaaagcatagtttaagtttgttgacataaatagtaagtactaatgccaacaggaccactaaactttgagagtggatagggcttgatgggatcttaattagtttaaaaaatacttaattcatcgaacagtgatagttcttcccctttattattatttatttggggcttcataaggggtctgtcccttgtgcttggttaaaagttctctctgtctgtctctgtctctgtctctgtctctctctctctctctgtctcctctctttctctctccaagcagtttactacttgactacgttgttcttgtttctcataacttttcctacattctgaatttggcctaactgtattcttaaaggaggtcttgtccatctacccacccctttcctgctcctggctggagagtcttaagcttagtgagacctaggtccgggcttttttaacggtagcttatcagtggtgttgtggaatacatgaagctgcatatctatctacctgcctaggagtctttcactgttaagattgccccccaagtctttgacaccatcctggcagcctttgatagtttccttgtatggtagaataggatgttccaggttcatctcacagtgtgcgtgcgctcccaacttcaaatgaaccatctctcctagaagcaatggggaggcacataatggcatttcacactctcagtctgtggaatgccattttgctcgtgttccattgctccagtgggcagcttattatgaagggaaagccaccacgggctttcaattgtaacgtcagccaatgggctctccaggactgatcattaactcgaggctataatatatgcttagcatgcgtgtgctctgaacttggtcctcagcacccaaaatatttgtatatgaagagatatagagctttctaatgtaagaacattttataatttgttgttttcatgctgagataacttggttcagaacaatgctgacataaaatacttctttttaaagtatcactaacgacaataaacagccattgggtggaaggtaagatttctgtgctgccttctatgttttcctagcaaatcccgagaaaaatagaacaatccagagatagttctaaggtcagccagagttgttttctcttgagtttgtaacagcagcttgctcttcagaaaggttcatttgcttttggtttgttttcaatttttaagaattgattttcctctttcttgtttctcactggcatgcaaaaccttttcacggctcagaggcccacgatgagaatcccttccgactatcccttctgtctgccctaccatgccctgcaaatctctctgtagatcaccagcatcattgttttgtatacgatctcatatcttaatcaacatatcatttggacaagttcctagaatagaggtgctgggcacatgtacatgcatatacacaaacccatagtcttaattcttgctgttcattaataagagggtttttatttgttcgtttttttctccttttttcttttttcttaatcattttattcatttacatttcaaatgatatctcccttccctgttaccactccacaaacccccctctccccccctcccccttgcctctatgagggtgctcctccatccatcctacccactcccacctcaccgccctagcatatccctacactgggtcatggagcctcagtaggaccaagggcctcccctcccattgatgtcaaataaggtcatctctgctacatgtgtgtgtggagccatgggtccctccatgtatgttgttgtgacaaggtctcactctgtagccctgtttggctggtgttcactgtgttccagtctggtcccacactcacggaactctccctgcctcagtgcccagggaagtggcactgaaggtgggagctaacacatccaactcaggatagaaagttttaatttttttttctgagatcgggttttaattttgagttttacgcattataactggaacatttattaattataacatctgtagattgtggaacctactgccatttttattcctaatatatgattaaaatttttgtgactgtttcctttgcccctgaaagaggatattttatatcattgaggtctgcgttctcggaactaacaaattatattgctcaaatctgataaataccacttatagtttgtccaactaatgtaccttttcctgcaagtagagtatcaaaaatctataatttgtgcttatatgtctctgtacgtctcctgtgatttctgcttttattgatagatgtttttgcattatttcatagctatcaccatctttattacatctttgtttttaagtatgaagcatgacttttagcactgtatgagttgatttagtcctttaaatacattctactcttaagggagagctgtaatccctacttctaatcaacaatggatgaatacggtgttagatctcactatggtatctctgcttggtttttttcttttttctttttctttctttctttttttttttttttattgattctggcaatgttacctctcaaaaccagaatgcccctcactgaataaatcctgaaggatgttcaggctagtgaaagacactcatgaaccaataagaagatatgaaaggtttattacctacacgacggagctccctgggagagctgtgcagaccgcaagcctttatggtccagtggttctctttatattaaatcctttataatgtctctattatttagctatggctgcataacatagtgcccctgtagtagtttacaacagcagttatttattttcctcccagttctcatcttaagaatctgagtggggacactcctggatgcctcctatctgggtcctttgtgtagctccaggcatgtagctacctggactcaactctgtctgtaaaccatttccaacccattcagcatctgccagtgggcctcagaagacccattttaaagcacagtcacacgttgctgtaggcataggctcttcactgtatggttttctatgtaggtttctggactacccaacaacatggcagctggtgatctggtgggtggggtggagacagagttagagatagagacagagagacacagaaacagagacacagagagacagagacagatagagatggagacacacagagagagacagagagagggggaagaaggaagggagggagggagggaggggtggagggagggaaggnnnnnnnnnnnnnnnnnnnnnnnnnnnnnnnnnnnnnnnnnnnnnnnnnnnnnnnnnnnnnnnnnnnnnnnnnnnnnnnnnnnnnnnnnnnnnnnnnnnnaaaaaaattaaaactttctatcctgagttggatgtgttagctcccaccttcagtgccacttccctgggcactgaggcagggagagttccgtgagtgtgggaccagactggaacacagtgggcaccagccaaacagagagagagagagaccacgatgaacctacagtgctttataacctaacctcagcatagcaccccaccattttggctgcattatgtcttcagaagtgcctaagcatagctgtgttcaaagagagaagtgatacaaacacagaaattccaggaaacagatattactgacatcagtcctgtaggctttccataataatccttcatactgactggccaatttgatacctgcctatgatgtatacagcacttgatggtcttaggctacctcttgctttgtttttcctctttcattcttaacttctgttctgtttacttagaaaatgtctacatacttggtctggagtcttcaacttcattttgtctaataaatcttccttgtgtgtgtatgtgtgtgcatgtgtgtgtgtgtatgtatgaatatatatgtatgtataaatatatatgtgcatgtatatatgaatgcatgtatgtatatatgaatgtatatacatgtatgtatatatgaatgtgtgtgtatgtgtaattatatttttttcagtctattggcactgttcctttagagaaccctgactaatacagaagggatcctgcctgcaagcttccctgggtttttccataatcaaatatttttctgtatcctcaacaatttaagagcttgcttcatgtaaaatctttggcttgctttttaaaaacattgtgaggagcttccccaattgttctttcttccttctagtccttcagcacttgttctggctccgggctccgggctctgggctctgggtaccgggatcccttttggagccactgccacctctctccacctgccatggacctcacctgccatgaagagctgctctctgacacaagacccaggagacctctggctatgggcacctgggggtaaagatggtttggaggactgaaagagacacagtggaaatgcttccaccaaagacctgagaacaaacatctcaaaagagtagaactgggtagtgttgacactgtcttgagcagtcacataaaggaagccagcatcatgtaagagatatataatgattgcacaaaattcactcaaaggcagacttgaaggacagagaccagaaagaataaaatcttttctgatgggggccttcagaattttaataactaccagcttttttattggtgagaatctggatccagacagcacagctgctctttgagactaccatgagcatgtttgatcccatcatgatttcctttaagagagtggcctagagatgggaaacacgctaacgagttgggcaattacctcgcatctatcacctgtcatcataactggctgctgcctgtcatccctggactagatgccaggactggagacaaatgggactgatgtcattttgaactcttcatatattttgaccataatttgtttagagcagagccattgttttttatgttttattttgtcttattttgttttctttttttttttggggggggggagcatgtcacataggctgtgtgaaagtgttagaactaataaacagacagacaaagatgatggctcactgttgccttagttaataagtcactctaaggaagtgactatattagactactggactaactaacacacacaaaggagctctttattaagactcattactgaaggtgaaggcgaaatccatcaaagaactgaatgaccacttaatctgcttgcacaagacaggaatccccaaatctggtatgacagaggatctttttgacaagcacaccctgggacagacagtgatcacaagagctaagctgacttccccaaaggtgtgaagacaaagggagagagattatagcgcgtggatttggagacggcatgtgcttagtgacttttaaatctttcccagggctatctacctaccttcctaccttccttccttccttccttccttccacctgtctctgtccagctgtgttgatcagaagcctcatgtttaatctgctggtagagttggttgtcatgagggggcactttcaacttagtcaagcagcagatgacacagggtccttagcgagcagcatctgtttatcttgtttggaagttaagcgtggtaaactgagggagtggcttgtgtgcctatgtccttcctgagctgaaatatccagagttggcctgaaatgagtaagaacacatctggtcaaatggaatacaattccttgtttaatgtgcttttgttccaagcatttgacataaaaatttaaatatgattttctaagctttcccatgtatgacaaagctataaataatgtatgagctggagctgggaagagactgctcagtggttagggacaacaggtattcttctataggactcaggttcagatctggtacctacatggtagctaataaccatctgtgacttcagttccaggggatccaaggctctgttttagcctctgtgggcactacatgaatatggtacacagatatacatctagacaaaacaccacaacatgtttaaaaaaatgtatggcccatatgcaggaagtaacaggtatctactctgatttccttatccttaggtgagcaaagaaaatatttcaaacagacaaataaaaggctagaggagtccatgggggccatgcatcggaagatggccaaagtgatctcaggactgcagagcaaagtcttaccacccatgagcccgaaggtggtcacagaggaggaagtgaaccggatggtaaggtaccatagagtttctacgttaagatggttagcgcagtatccttgcaacgatgctgcttttgttcttccaggatatcagagaatcgctgattgatatcacgccggtctctagcatgttggagcgcataaacgcctcccacagccagagaaggtcttatattgcttatgtacttcacagggcagggttgccttgggtaatccattacagcaagagtttccgtctcagtccattttctgtgcctgtagcagaaagtcagaaactggacaccttggaaagggttgttttatcttgtggttgtggagcttgggaagtctggtgctgggtagctccatctggtaatggctccatgcctaaagcacccacgtgtggagagaagggagctaacctccaagagaagcattcgttcatccactagctctgacacttgcagggacacacccaaatcatggaactgtgtgaataagcttactaaacctctctgggtggtaggtagagccccgtgaactgccattcagttacagtcagatgacagattcccacaaggttcatcgtaataatctgtaacccgagcattggcaagaagtttttaaatatattttttaggacacagagcatttttctttttttttttttaaaaaagtgtctgagaaaaataaaaaggtgtcttttaaaataaagatttctaacgtgaaaacaaggatgcgctagggactagattatgaaccacgtgctgtagaaaccagttacaaaaacggcctgatgctggcaatgacactacctacctctcgataacccggttactctcatctgtgttcccgtcaaagagaagttaaagccaagttgaaaactatgttagaaatgactcttcatttgagtgtgctcagttccagagctcaggcgttattgaagagttctagactcaaacccagatgagccgagttacatgccccgagctgttaataatcagccttggcttccactctgctaacgatcgcatccttcccctcatgaaaagtaggcctggaacaacaagaactttctagaacaacaaccagtgcacaacagtgacaggcatggggtagctaatctctgcggggctagttttatttaagtgacaaaatacacgtattttctcataaaattggtaagtattgaagcatctgattcaggtgtgtgaacgtgattggctgttaagatccagacccaacacagagcttacttctgaacatgtcacacatttctaagtgattggcttatacctctatctctaattagaaaaatgaactcagtcatgatgtagtctccttaagcactccagtgctatgcttgtctggcctgtttttggttggttggttggttggtttggttttttttggggtgttttgttctttggacagattcctgtgcagttccttgactcattttctctagggttccattgtgtgcttccttcaaaaccaaaagagatgcgctagtagatgtcactttctgttgctgtacaaagacctcaggagtgcatgggatttctcttgtataatttagttaccgtcaatattttataagggaactcagtggcatcccacaattatcctgaaagctgcacacacaaattattcattgccagtgcttaggggaacacttcctcagcttaaccacgtttgaatgggtctcttatttgcattccagctgacaccctcagagttcctgaaagagatgtccctcaccacggagcagaaattggcaagtacaagaattatatgtcgaccgcagatcaccgaactcttagatatgggagaaacaacacatcaaaaggtacatcaaaggctggagagatggctctgtggttaagagggattgcagctcctgtagaggacccaggttcagttcccagcacccaccatgtcaggcagctcccaactgcctgtaatttccgctccaagagacctaatgccctcttctggcctctgcaggcattgcacctcctaccctatatgcacgaaattaaaaaccaaaatacaggttttttttaaaagcacatcaaactgaacatagaccgtgtcagcatccagaacaacagatgtgaagtagaaagtagtgtttctgggctaaccaattccatcccgggttgcttcccttcctatctgttggtctctatgacacggcagtaaagtcattatacttaataaaagccaaccttacttaaaatcacttttgactaattctactccctacttagttacttctgatcagtattttatacaactgtttccaggctgagtaattccaaggtgtatatcagccaagccggattacgttatgtccttcgagtcacaagctatccttccttacctgaactgcccataaataaagaaaggagagaggcaaagggcatctgctgcctggttttggcccatttccaagaaacgttcagactgaaaaatagtgatgtttcatatttttgtattttagtgttaggctatatgttctcgcctttaggggcaaatagttatttagaagaagaagaaaagaagaacttgggactgaagagatggcccagcagttaagagtacttatttcttttgcagaaacaggttcccttcttggcacccacaaggtggctcataaccatctacagttccagagatcccctgccctcttctgccctctgcagacattgcacacacatagttcacatacacacatgcaggcaaaacactcatacacataaaattaaaactaattgttgcttttaaagatgttatttcctactttgtaggtaatttcttaaaccatgtgcctcactttgctgcataaataatgagtctccactgataggactatgcaggtgtccccctcaaaatcccagctcctcctgagttgtctgagctacattccccatgggaccgggtctctgaagcctttgttcctactgtcttaggacctacagggtcccacagttcttagcattgctctctttatttgctggtggcatttcccccacatcaagcacacttcgcctctaagcaggagcagcgtttcccagagctgacgactcctcctcctcctcctccctccaccctcctccctcctcctttcttcagagggactggcagagcaggctggaattgttggtaaggttaaggtagccctgtttagtgaactgcactgagccctgctgtgaaggattagagtacccacccggttgccttatatcccctctcactcccttcagccctcttggttgtttccgtgtgtgctctggatttgaaccatctctctggagagaggccggggcgatcagcctctgttaactccttctagatgaacttacagatctggtttccatgtctctgatcctgtttgcatttggccctcttaatttaactgcaggtttcttccccacccaattctaaagttgggggttttcccttcaacagctccatggctattttacttcatgatctccaggcatcagatgatgctcatggaggctcaaaggctggctcagccttcaccccacgggcacagccacactccagtctgcacactcggacagtgtgcccttcattcacgctcagaactttgctcagatgtgacttgggttttcccatgccaccatgctccttgttttatctgtgggaagtctctttcctaacatttcagctgttttgatgttcctctgagggttctctccccttcaggagcatcaattatggatgcatccatcgggccttctttgtctgcccctcttctgctggcggtccctctccaacccagttttcactttgtgctcatctgcttcattgaaatgacactgagcaggctgtcctccctatcccttcctttgccttctgcgtctgtctcacttaagtccagtccagtggactctgctcagctcctgtcatctgaagccatgtctcccttgtgaaccttgtaatccattagtgtaggatcgattacactgactgcttttatccatctttacttctggaatattccttctttccctgaaactctcctctctctctcctaaattcattcctagatcagagcctctgaaacatgttttctgacatgtttctgaaaaaatattaagttgaccatgctcatgtaggcatagaagatagatctgtgaaatagatccggggagatggcttggtgggtatcatgcttgcagcacaaccatgtggacccgagttctagtccccagtgcccatgtaaaggcaggcatggtagcacagtctatattcccagtgttcctactggggttaggagcagagacacaatggtccccagaaaccatggtccagctaacctggaacatgcatgaacaaaccagcaaccccctctgccggaaacacggtggaagacaagaactgataccccagaatttcttctcgtgtctacacatgtgccatgcacatgcgagcaaacatcagggacacacacacacatgcacacacacactgtgtccctttccacatactaaaaaaattttttaatcaaatacttttagaaaagataactatacaaaacaaatatctgataataaatgataaagaatgaattataaaacaagcacttgccattttatcatttcctttgatttttttattgcatcttatttatttattgtgtgtgcacatgtgcatgcctaataaatcccacggcatgtgtgtggaggtcagagggcaactggtgggagtcggctctctccttccaacgtgtgggtccctgaagttagacgtagatcccaggcttggcaacaagggcctttacccattaagccatcttgctggtccccaattttaatcatttattaaatatggaagcaactttgcatgctaatgagatggctgtgcttgcttatttttcattaagaattaatcttggttaaatacgctgcgaatggagagcatcaacaacctttttcagagctgattgagattttggtatcatagtcccccgtgttcagatgccgcttttcagaaatatgaaacacaagatggcagaaacctgtttagggccattcaaaaactgcttgaaattctatatgaattctaaaccaaaattcatttaactatttttttttaaatgagactcaaatcagcaacggaaagacagattttaaaatcacacagtctggttcagaaaggcactaatttgacatttctgtgctgaggagtcgtattgcaagaaaatattacaggtcttccttttctgtaagtaactatttctaaaggaacagaaaacactgtatgcccaataaaaacattttaattcatagtgtagaatagtgttttcaggccgcctttgctgttgtagcaaggtacaacagcagccacggtgtgatgcatgtgcatccatctcatcagtatgtgtggtgcgtttagagctgaggctgcagtaaagtcatgaggtacagcacaggccattgctgccagagacaccttgggttcattatgcgtttgattttgaattaatttggggtcctgtgctcgaaaaacttttaccgggcacaagttttccatgaccccttatattcggttacgtgaccccgcatatgaggtcacgacccacgggttaagaagctgtgccttaggtgaccctttcgaccctttctaggggaatggcatctttgatcctcttctattgtttgttatttgcatatttaatgtcgccagtgatggagaggtgcgggggggggggggggggaaggggctcctgtctgctaggcaactgcgttgtttcctctgtttcatttctagcccacgtgttttgagtctgatcttcgtatttatatctcatgctcaaacgtgttatgttggagatccaaatgcagattcaagcctctcaaaggctgtgtttcttcttttgcctcttacctcctgcagatagtaactacataccttgttctccaagagcttcagttatccctcatctctatctccctctccctcgctccctccttccctccctcttcctctcctttcctctcctgttcttctccttctcctcctcctcctcctcctcctccttctcctcctccccctcctcctcctcctcctcctcctcctcctccttcttcttctttttcttctttctctctctggcatgtgtatgtgtggtacagatgtccatgtctgtgccttatgtgtggtatgcaatgcatgtgcacatgtgtgttcatgtatgtagagattgacatgggttcttgactctccaccttacttattcatcaaggcagggcttctctcttgaacccagagctcccagatttagttagtctagacagccagcttattcttgggaccacttctctctctgtgccttctgagtgctggcgataccttgtctgcccagtgagtaacaagcgcttgatccgctgagccttctcctccaccaccgccctctacttctctgtttcaatcttaccctccgttatagcaatccataggatggcaagagggatcagtgtgtaaaggagcttgccaccaagcccgatgaccttggttcgattctcaggtaggagagaaccagctcccgcaagccattgtcaggcccccatgacacatctcacacagacacacacacacagacacacacacacagacacacacacacacacatgcacactataaatgtaattaaaatgtgaatgagatcatgttactcccacacttaatactaccagtgacttctattattctcacaaaatgtaatcttgacctctggacccaactaaggcctgacttcatctaccctgtcttcctcatgtctccctctctttcctctgatatgtggccattacctcctaactacccttccttcttactccttatgggtagtttgaataaaaatgccccccccatagggctataggaactggcactcttaagaggtctgattttgttggagtggatgtggctctgtttgaggaagtatgtcacttgggggggggggggtgttgatgaccagtgtggcatgctcttcctgctgcctgtggatcctgatgtagaactctcagccacctctccagcactgtgtctgtctgcatgccatgcatgccgccatgcttcccatcatgacgataatggactgaacctcttaactgtaagccaggcctaatggaatgttttcttttataagagttgctgtggtcatggtgtcttgccacagcaattaaaacaacaacaacaaaacaaaaaacaaacaactaactaagacccctcttcacacgaagaatcagttctcatgagagaatggggagattggctgcctagttagttacacatgaagctgtgtgtggcaaagcctccctgagctaggcagatgtctagctcagtctcacgcaaaggtttggaaaagggtatcccagtgagaaggacgagtaagggtaaagcccgggaagggttacacctcagccttgtggggaaagggctgttggtggctctgttcacgacactgtgctcagcacgtggaaaggaacacttgacacgttggaaactcggagtttattggaaagcaaattgtcctttcatctcctctagctgctctgcttcccctgtatgcttgagtatttgttttgtgctttttgataactgtttccctatgatacatttgaaagtttggtgaagtggtatggttgagattgtcactgctttgtggggctgaggtctcgggtagagcactagcctgctctaggcttagggccagtccccagcaccacgggaacaaacaagcacatagaattttcattcctcattggcaataatcttctgacacatgttctttattcaagagctgaggagatggcccagtgggtaaagtggttgccatggaagccctggggacctgaattcccatcccctacagccatgtaaaagccaggtacagtaacatgcatctgtagccatgagctgaggaggcagaggcagggggatgaatggagctcgttggccagacagtctacccacttggtccagcttcagtaggaaaccctggggagtgatggaggaagacactcaacattgacctctgacctgtgagccaggatatacacatatatgcacacacacatacacacacacgtatacaaacacatacagcacaccacgcacacataaaattaaaaattcttcattggttatatttttcttcttctttctcaagtattatcacatatgcatatatatgtatagacatgtgttatcgttatgattgctattgctacccatctttgaaggaaggggattctgcctagccttgctgttttctctgttaacacttagtgatgtccttgaacagtgtcgcttctccatgattctcatctccatgattctcagtgaagttttatgaagatcatataagcttgtgtatgtatttggaaggaagatagtttaaaaaaaaccttttgttgcatctgtgtgtttgtatgtattatggatgtaagcatattcatatagctactggcccccctggaaggttccttatgcccattttttggaccatagcctctcctctttcctccaaaagaccaccaaccctcccttcacactgtagattagcttttcctttctgtgagtggcggttttgaatgcgtcctttcatttctgcttaatttccctcatatgatgatgttgggagtctctctgagagaaagcaaggactcattgaaactcactgtagtacagggagcgatcaggctgtgcccagcccgggtctgctgcgggatgcccagctggtgcacacatcccacagataagcaagtacttactattattgtctggcccacgttcattgagattgccctgctagtcacctactccttcatcatccttccctccttcccctgcatctgaagatctaaaataattttcccctctctgagaacacccttaagtgttttcctttgaaaatcgttaaaattataattttttgtctttctaaaaatttttaacttctttgtttaaggatgttttcaagggtagagaatattatttctgtagaaggctttgcttggttgggtggctggctggcttgggcttgttttctgggctttaaatgatgttattttcatatcctttaccctttgttaattgtgtttatcagtcaaaacttcttgtttcttgcttcaaaagcatcctctccgtttcctgtttgcatctcttgcacctcttgcatctcttgcacatttttgcctctgctttcaatggcttgacacttatctacctaggtatggatttctttttaacctgagttcaccaggcctcctgtatgtttgccttgtctccgtcatcagctgtagagacctccctgccattgatctatcaataatgcctcctccccacttgctccaaatgcacccatcttaggccttttgatctgttgcctgccaatcttacttctcttctgaattttctattgtcgcaacctgccctcttggtctgaatgtccttttaacccatctctatgccagttacacttcagtggtggccactctgcagcgtgtccccccccccccaacagccccccaccctcgagttcctatttaaggtatttaaggtgtaggatttgcatttgcttcctcaccatttctgaccctgccttgttttttcaaagagtgggtcacaccgctgttgccactgcctcttgtccgagctggctttcatttatggcatcctgcttccttgcatttatagctggttgatagaattacaatctgcaaatattttgcagcttacaaagcacccttggttgtacactggaaattttcacaaatgggagatggcataaattatccagatcctgcggtgactctctctcctttcagaggggatcgggttatttgtgccagacttcaatgaccactagcactcgagttctgaggaaccctcgtctattcttattctgtggggcatctagccaatgagagcaaagcccatcagagtcttaatcttccttgacatgcattggaactccaatctcttgtctctctagtcttgctgcaggttcaaaagtacatatctcagccctgtccagtctaatgcgcggaggcaggtgtaatccagttgtctctacccaccatgctctctctcttcacccatctatctgctttctcttgtagctagcaattccttgtgatcttgttagctgtgtggctgagcagatctttgttgatcaaactcttgagttattatcatagggtaactggctcaaaagatcccatttaccatgtttggatctcaaagtctgggttagtagtcttattcacttatcatctgttttagcagaaaactaaatagacattttagtgtgtgtgtgtgtgtgtgtgtgtgtgtgtgtgtgtgtatgtgtgtgtgtgtgtgtgtacatgtatgtgcatgagcctgtttgcacacaggagagtacagtcccaaggtcaaccttagctcttgcttctgagaaaccatccaacttgttttttgaggctctctgaaagtagctgactaggcaattctggatggccagtgtgctccagagatccacctgcttttgcctccccagtctcggcatgacaggcgtgcactaccaagcctggcttcttaagtggatcctgggatcagaactcaggtcctcagacttgtgctgtaagctctatactgacagggccagctcccaaattttctaccttcttttgtagtaaaattgatgaaaacagtctcactaattttaactattatgttgattccccttttgagtggcccttgtgttttttattttaatcggtctttgcattacttatcctagtcacctttgccactaatccatagtatgcataattttgtctcccaactgcagttttccagagttgacttggatcaggccttgttccagccctttccgtctgaaatcatattccagaactattctccctgtgaagtctatgaggtgccattggttttaaggaacaacgacaaagtaagtatgttcactggtatgggtaagcttttccagaacacgggaggaagggttcagtaagctggattcttcagggtcttagatacactctttaaacttgatggacatagggaaataatgtgcaaacctgctctttgacttcaagtttcagaaacacaaagctaggtctgattgttgttatctgtaccgtccagggcagtgcccgacagatggcaagctcccaacatgctctctaaattcctttttaaaaaagatttatttatttttattttatgtatgtgggtgttttgcctacatgtatgcacgtacactgccaacagagacccaaagagggcgtcagatctcctggaattggagttacagatggttgtgaaccaccatgagagtgcttaaaatccaagtcaggtcctttggaagaccagccagtgctcttaacggctgagccatctcttcagctacatgccccaacttcaggtgcaaaaagtgtggatttgatgagtggcagggagtgcttgtgtctgaccagctgggctaggattccatcgagaggaaacgggtactactggtgcagacatcctctgaattgtagaccccgttaccctagttgaagggattatccgctcagaggactagcaaatgtgagtatgtatactcatagtcctcacattgtatttctaaaaaccttctctaccttgtgaatctctctccttttgtggtcttctccctgttatatgaaacagccttcagaattgtgtccagaaggcttctctcagtatccatgccctgttcctttgtaattacaactgagtgtttcttgcccagccttacatcttcttctttaaagataaactaaggtttgtttcgaaggaaagaattctatgccagaggctttccttgacacctggcagtaacaggagaagggttgtgtggaagctttgagcacagttgaatgcagaaataaccagatgctgtgtgaagggagagcatcaatgcagccctaaactccagggagaaggcaaataggaatggaggaatatggacgcagagagctgagccacaagaaaaatgaggaaataagtctgtgcaggaaccaaggcaagcaggaaggcttggaggtatattcagcgcagtagctcattaaaggactcagtgatgcctttcagagatcaataaggtgattgaatgccagcaaagccactctgtggacaatggtacatggcctgggttagcgcctttgtctctggctgcagtgtcattagcaagagaagctcaggacagaaactcagggcttggtggagagatgagaaagaactgaaggtgaccagggtcacattgccgggcctcgggaagagtcacatgatatagacattaggacttttcacatggggctgccaacaagtcgttttcttatgtagaattcccctttcccctcttactacttgtcttagttagggttttactgctgtgaacagacaccatgaccaaagcaagtcttataaaaaaaacaacatttaattggggctggcttacaggttcagaagttcagtccattatcatcaaggtgggagcatgcagtatccaggcaggcatggtgcaggaggagctgagagttctatgtcttcatccaaaggctgctagtggaagattgacttccaggcaactagggtgaagatcttatatccacacccacagtgacacacccattccaacgaggtcacacctattccaacaaggccacaccttcagatggtgcctcttcctggtccaaggatatacaaaccatcacactactgttttacactgtttggagttttatcaggctagtaaggatgaagaggtactaggctaaaggtcccttggtaattctgcttgaccctagacatgaagtggaagatgaaatctacgcattccccctaccccattttgagtcattaacaaatactctttagcaggtaaggtcccagtactcatgagtctgacctcagaggaccgtgtgattgaggccatttgagttacataggaaaatcttgtctctaaaaccagaaaaatccaagcaaaccattcccctgctgtgtgtgtgcctgtctgtgtgtatgtttctgtgtgtgtatagatactccacccctgaccactcccttttgccttgtaattgtgtttcttatatctgggatagagctacatatctctgggcaagactaggggagcagaggctaagaccttaaacaaacaaaactgcttgaagctgccctgagatcagctaagggttatctgtctgctttttgttcttgcttcttgatgaggttcccgtgaagagggtgggtggaatcggtccttggctgggtggagctgatgcactctcctcctctgtggcccagggaattgtgtcaaagctcaaaagccattgtgagaatggaatggcacatcatgtcccggggtgtgttgggggatggtcctgagagcccatgtttggggggggggggagggatagcagggaggggcagggacggtgatggtcatgggatgtggtttccccaagcacttgccaaatgttgagacaggcagtttagctctactgtgtgccagtggcgggagctgaagtgtgtgtgtgtgtgtgtgtgtgtgtgtgtgtgtgtgtgtgtgtgtgtgtattgagcagtctgttttagaagatagtcatttcagctataaaatgaacacagactttgaaccctaacaaacatgaatagtaatgttagtaaaagtagagttaatgggtcatagagaccgactgtcaagcccttaggacaagggtaaatatgatttccctttgcagttgaagcaaccgaaatcctgatcaaggccatagacccagcaaggagtagacggagcccttactgtgctctactctgaagtttgtgcttctcctctgcctttctctcgtacataatatcaccatctcgtgtttctcctgcagatcccacggatggtaaaagttgttgaagaaagctcaccttactttaaaatcatcagccccaaagacatcggccacaaggtagcccctggtgtgccatctgtattccgaatcctcttcactccagaggagaacaaggtaaacccaacaccagcaaaagattggttatgtgtctctagccctctgtagttcacggggctgccagtgttcatgggagtgtccgtggtatttgaagtgggcagtggtggtggcagtggtcacgagggtcatttcgatggctcttgatattggcagttaacccgtgatggtgttttgttggtgtggtagctgtattagtctggggttttgttggtggttttgttattgtggcagaacacctgagggtgagtatgtggaaagaagagatgcatctagctcccagtcttagaggctgacactccatatagcacaggtctaactccagcaagccccacctctgtcatagctgagtcacctcacagtggatggcatcatttacaaaggagagatgggatggtgatcaaggaagctacaacttacagaaggaccagcaatagcttcctccacacactctgccaggctccacctcttaaagggacaccacctaccaacatcattatgctgaagaccaatctgtctgcctatgaaccccagagttcaagcaatgaacaaaacagagcagtggagctggtattggtggctctgtgtgtggcattgttattagatatggtggtggtgagaggagagaggaggaagggagataggagagaggggtgctgttctactagtgataagcagagagctgttgtgtctttgagccctaagtcgctaagctgtgagagagcctgaccctgctggacactccctgctagcctctaacccaacaggtttatactatatcctgtcgaagggccaccaataaagaagaggtacaatctgcatgcagtaagctgagaaaaaggataaagaccatgtctttggttggtgggtcatatatctctcctcccagaattccaacctagctgaaaaagaggcctaaattcaagtattgatcacattcagccttcagagcaaaaacatcgccagggctcaaggctgagaagaggttctccatagaggactgaagtaccttagagtccccctcaaacacagcagggaaggaagagctaacgccagagatctgcctggtcaactgaaccccgtctgcacacaaacagccaaggaagagccggcacactaaaagataaagccgtttcctgcctcagcaccacccgaaggctcttctaggtcacaggaacccagggtttgccttggagggaaggagcaaggatgcaggagtcagagagtagctccccttctgggcagggttgttggctgggtttacttcctgctttgggagcccaactggggctgaggagaggaagggaagggattcaccaccatacaaaggaggtagaacagaaaatatcatgtaactggacatgagcagcaagctcagctggctgtcagcgtaggtggcagcataggtgactgcttaggtggcagcttaggtggcagcataggtggcgatgggggaaatgatctccaggtatcatccctttctgagtggccattgctgggggagggataaccactcacttttgagaatatggccatccataggcttcctgtgttccaggggtagtgctaaacaatgagctatcaaaaaagggggaggggacataaagttgggagggaggagacctggaagagacgtgtgagagatagatatgatcatatttccttctatacatgtatgaaattcttaaaaaacaaagaaagccctagaataaaaagatgtgggctgaggataatgttagcagctggcatacatatacacatccatatccatatctatatccatattcatattatgccgttatagctggaatcaatagatgagccagacaagatagctctgaactgcctctctgcactaatacttattgtgcactgttaatatcattaccagctatctcacactaatgtggccgtgattccttttctgcagggcagggccacagtctttcatggctggtttcctgacatgtccctggtcacactgttgcctatctcttggattgtgtttgtagaatatggatatacttggtaatcactagaacaagtgagaagatgaatcgaatgtgaggttcttttttgctgtggattggtgaatcaatccctcccttcccccaccgggctctctagccaaaggctatctgtgaagaaaaagagcctgggtttggctgggactggggtgtcatattctggcaccatcgttttgtgggcagcagattgtaggcctctgtgtggcctgaactacagagcatgtttgatttggggactcatagttttctttttttttttttttttttttttgtcttcttccattgcaggagaatatgtgttttctgaagaaaacatatattccccgagaaatgttggtccaccctcaggagctctgactgagggagttccatatggggctcagaggcgatgggatacagtacagtgtaagcaaggagacagaatagtcttaggtgtgtgcattacatgatttcagtcatcagaactatgtattaaatatttctgttttccaacacccatgaatatctgacttaaaagctgtacgatggcagagcggtgagtgggtggaaggtaggatggagctagactgaaggactgtcgcttacaggtgagtctgggtgatgtaaggtaggctggagtctgtcacgctatcccattggcttctgtgtgttaaggtttccataagcaaaagctgacactgtcctgcttgtgtatatcacaggcaatggttagaaggtattctatgtctcttggcattcgctttataagtgtgagatcctaatattcattcacatcaaggattcacgggcttggctgtatttttttttttttttactgtttgtccgactccagatgttgaattacccccttgacatttcattcctccaacactgtatatctattaggagcccctaatttaagacaagttaaatgttatactgttacttcctctaggtatttaatgtcatggaagttgacaaatatgtataaggaggcatggtgagactaatggctacctaggagaaatacaatttcccaattttagattccgttaaaatttaataaacaggcccggtagcctaggatcccaatcctaactacccgaaggatgaagcagaccaatcttcaaggtcaaggccttcctgggctatagagtgagttaaaagccaaccttgataacttactaaaaaaaaaaaaaaaagaagaagaagggagagagagagaagaagaagaagggggggggagaagagagagctgaggaaacaggtcattgagaaggacttgctagcaagcataaggcactgagctcatctcccagtataggaaaagttggggaggggcggattttgtgttgggattggctgtaggtgatactcgggtttacagcactcttctttctgaagacgcagtcagtttctcttgctgcgttgagcaggatccagttttcagtatcccactcatcctcactgttgggaagctgacagggccagtgcacagcatgaccagctaggttcaggcactcgccatccaatgcagttccagaaggcagcagaggagtaaagtgaagccaggtctgccttaggaaacagtcagtcatgctagctgggtatccctctttgttcagccgaccagactggcagtcaaagggttgatgccgttttgccgctgtgtcccctactgctctgctcactctccatcctcactccatgaccctcacatctggagggtgagatatgtaaattgcagcgtgtcacatttaataagctcaccccctttcagctggatcgtcaacacctgtgtatgttagcacgctgaagatgataatgcaatttcttccctgtcatgtattgatcggtttcctgggcatgacacttgctaagaatgccaaatgtccagataacaggtgcagtcaattcactgtgactttccctatctcctcccacacggacttaaaaaaacccgaaacactggatcagtctagtaataccattgcgtgtataatgcaccatgaagcgtaaccgtcagtgctcttatcaaatcgtaccaaggaattctggagcctgtcactaattttcctgacctcttagattgtaatctttattcctaaattgagttggggaactattaagttaaacactggcttagagtcaggcaagtatgtttgtatagcgctgcaatgtgagactgtagcagcatttggaggaggaaatgcagggtggggatttaataatcaagttttgatagaaccagaatgaaggcacattaattacagctaagtctaggtgatgggtatattggcatttgttatgctattctgtcttctctgtgatgtttctagggcaaatatccaattagttgtcaaaatggctttcatatgaaatttaataagtgtctcaagaaggacaggagaaaatcatattttatgtgctctaggtatataataatgatgataataataatgtataataacatatttctaacactttgaagagtagataccataaaatctccttgggtttagggtatgaggccaggtctcatgtcaactagaccagccttgaagtcaatgagaagctgagaatcactgtgactgctgactctccagcttggcgctggaattacaggcatttccatcatttctgactctcccaatcagtaattttctttgtttcgggcttttttttttcttgattaaatttagctcttcctagatctgcctgggtccttcctataagcccacagcctaacatcgtgccagccacaatgaaacagagcgttaagaattaacttcaagaaaatataaagcagtctttctttcaatctgagtgtgtcttatagatcataaaggcagaagcatgtaagaatctttttcttttctgcttatattataaattagcatccttcctggttgttttaaccaggagaataatgtctaaggactctgttctgggaaggacgctgtctgcgtttgcttttgtgtctcccatgagccatctctctgcctttaaaccttccggactactagggcatcatttgatcattagcctgataagaatctcaggaattctcttcatagttcaggattgcagcaaataatctgaaagacaaataatgttctttcactcactcagtggcttgtttcagctggggtcccattctttgagctagagcactgtggctaatgaaacaaggcttcatggatcttgtgatccacagtaagaggacatgctgcggtgtaaatcagtgtcaactgctgacatgctacagaagagacaatgctggggatccttttccttcagtgggagggtgagggaagggttctcagttgaggtgacatttgggtgccaagttaacatcagccatgcaaatgcctatgggaagagccttctgggagaaagggcagagagtataaaagcccagtggcaaaactatgctggccaggagctcaggagagtgccagaggctggtagggctgcagcagaggaagctgctgggaaaaccaaaggggacgaggttacaggagtgaggaatggaggtgttggggggtcgtgtaacataagatgggaagttgcaatgaactcttcaagacctttttttttttttatggacacgtgtaccatctgtaaagcttgagaatttaaagaaatgtttcacatcacagatttcaatcgaccactgcatgactactctggctttatctgcctgctccttgccacagtggatttttgaatccatataccatatcatttcaactacaaatacttcaaatttgtctctaaagataagaaccttttaagatgctaataaattcaccagtaaatgttaacaaaccatggtcccttaatacctccaataatccagtcagtattcagggttcctctgctgagtcaggttgtttcaatcagggagcaagtgaagtttgtccattgatcttcactgacttatttagaatgatcgtctgtcctctgtggtttataaactcttgggtaggtcagagccttgattagattcatgacttcttctgggagcctgttgtgtgcgtttcctgctgcatcacttcaggaggtgcacagtgtctgtatctgtttctatggtgactcagtgagggtcatccctcatcatccaggtctcactgtgtaaatcaggctgacctcaaactcacaaggatccttctgcctctgccttccgagtgctggggcgaaaggcttgtacctctacccctgacaacttttaatacacacacacacacacacacacatcagttcagcttagccatcccttttgtgcgaaaccatataaaaatatggcttagtggtttttaagcactgtgatcatctcttgccagtaatacaataccacagagcaaataagctattcaaaagaaaattttatttttgatcctcattctggtcctggggtgaagagccaatttggccctgatgttcttacaggggggagtcctgaggcaaatatccgtgtgtttaggtccctctcttcttacaaatccaccagaaatgcaaccatgggggctctagaccttctctggtattagatgcctcccaaagtcccaaactgtaagcacctgagttggaattcaattatcctgcaatcatagaatggggattaaagatcaacacatgaacccttgatgaggggcacacacaagcacatggaaaccatggcgacttgatgtcccatacatagttactaaccacagtgacctggctgagtatagatcgggtttcatctagccaaaactggaccaacatctctccagcttctgaagaccactactctactctttttttttttttcctctgagtttgactgacttggctcctctagatacacgaaatcatatgtttgtttttctgtacctaatgtatttcatttaatgcaatgtcctctggagttagacgtattgttgtgaataacagacttctcttccttgcatagtattccgtagtatgtatatgcatgtgcatgtcttgttatattttctgtatttgtgcactccttgatctacacatgtgctgattccctgtcttggctgtttggcactgtgggcatgtagagctcttttgtacactgatttcatttcttttggataaaaactcagacataaaatccttgggttatatggtggctcaatatctatctatctatctatctatctatctatctatctatctatctatctatctatcaaagttttggtacaagttttctttgtgtgtagccttggatgtcccagaactaactctacagattaggttggccttgaactcacagagatctgccttccaagtgctgggatcaacatgccaccaatgcctggctatttctaacttttttgaagaatgtccatgatgctttcaacaatgactgtgctaatttgcatctctgccaacagtcaacaaaggagttggcattctaactggattccctgctgtctgttacatttcccagcctgctttgctgcagtgtatgtgtaagaactggccaatgagtgaaggcagcaggatttccaaggtttctacttggaggcagacagtgcagcaggaggttctccctgctgttccctactgtcccctgctgtccttctggcctccagcttgactgggagcacagcatccccggggtcgctctagcccgtggggtgacgttgaggaaagagctgtgagacagactggcagaaaagaattggaagctgtgtcccatcagaccatttagacgccccatcagtatggcctgcacaaccctgtgttttgttttcctgctgtctataatagactggaactgtgacaaagccaagggtagaggtttgcagtagttcaggcaggtgacaaggactgtttgaactagagtagcgacactgaggggacttaagaggtcttattagagccgccaggatctggataaggaagtgaattaaagaatggagctagtgagactcagaaaattgtggtcagtaactgaaaaaaatgaaggcaccgtttgcagagtgggacaaggatgcaaaagcaggcttgcaaggctgggactcaggagttaaatgttgaattgtctcttggacttggaaaagatattagtgaccttggctcgaagacattttacgaaatgctgtgtacagaagccaagatgcttcagagagaacggaaggtgagggggtggtgacactgggtccaaattaacaccaggaaggagttttgctacaaagtcattgaaaaaagtgggaggggggatagctagaggtgtagtttatatataaaatatataacatgaagcttttcaaatgtgattgtaagctgacgtgcttattcctcaaagagggaagtctagagattcggggcagcgttgaaatgacagaggggctggtgtctagtatgtaggagagaggttggtccttggaacaggatgaaagcagatggcatgcaggtgaaggaacaagtacccagtactggcaggtggtgtaagggtactggatcaagcatcttgactgaagaagaaatcacttgtcctagtggttaacatcataatacatatgaattataagtaaattcacattatcactttatagtaaataccaaatagttaaaacaaatttcctatatcccatctctctttccatatgcaaggtcaaaagtcattctcttaatgacgtttttatggagaaatgtagctgtctccaggatgctgagacctcagctggaccacaggccaaacccaagatgtctggccaatcccacttttaaactcactggactttctataccaaggaattccttccgagagtgaatctgagactgagaagctatgatataacagagacttctcactggtcaaggaattcagcaggttatctgaggtgccaagtgcggacttccctaattccctgtcagatctggtttctcttgattgccatttcctataacaggcttaggagtgaagaaaagggagagaagggaagtgaggttttaagcacattggccttggctttgacatacagccatttattggagtagaagacaccatttccctctgccatgtctccaaaggaaagaattctgactgtacttgccttctaccaagggactaatgtcaaaatcaagactcgctcttttcactcccagagtcaaatcttctctgctcatattttcctgctgtttttaaggattgaagtatgtctggaggatgggattgggtggtggggttcaggaagaaggctgtctggacagtactgctactggggtagccttttaggatggagagtgactcatgactgagcctgtcatagtagaaggggcagcgcttggagcaaatgtcctgcctttgaatggtgacctgattcctctgcatctcaggacagggaaagggattccgtcagcatgactagttgctcctgagtcaccagtaaagcactgtataacataatctctatattgcataatttaacatactcatatacctatccttggagattagagtgtgccttaaaggaagtgtttaaaaattgtcttcatgttctttcctggatgtgggaatcaagtaaggaaaaacaaaaaaccaaacaaattgggacttcatgcctaacctctgtttgggaatttgagaagattccacaacatcagtcagccttctccgctatctctagctgccttaaacccttacggagcaagacataagacaggagcctggaactaaaaacaaaacaccccagattggcctgagagccccactctgcaggaccccctccgtgccttaattagtactactagcctgactgctttccagtttgtaattcccaacaaaccctttgctgggtgggtttgagtacctaaggaagagaaagtgaaagcagtgttctgcctctttaaggcttggctgtcatcccactaaacaatccttgagattgaattctaggggttttcctaggatcggatactttggtgcagtttgtacttccttctgtccgggtgtcatcagtcccaagcttggctttgccatctgaaaagcaaaatcaattgcaaggctaagagcccaacaacttaactttaatacatcttgggagaactgttcattaatttttattgctcacgcctacccgaagactttatgttcacagtctcccttgccaggaactctccgttcctggatctctcctggttagttccttttgcatttcagctctgcatccaaaggtcacctcctccgggaagcgtccctggttatttaagactaagtagccccttctcacagcagcgtttgtcttacttattattctactgtgatagaataccatgatcaaggcaacttatcgaagggaaggcttattggagatcattgtcccagagggataagagtccatcacagtcaccattaggcaggcacagccagcgcagaggcacctcggcaggcaggcaggcgtggccactggagcagaaagccaagaggtcacatctcaaacagcaagcacaaagcagggagagagagcaaactggtagcagggtgaggttgtgagatctcaatgccaacccgcagtggcatccttcttccggcaaagccacaccttctaagtgcccccaaataacaccatcaacttgagaccaagtgttcaaatgcccgagactacgggagacaattctcactcgagccactagggcttttgacaatattattattttctcaaagccaccaccatgctctgagctcaccttgccctagcatagggacatttttagtactgccaccatccttacatccacaacacgagtaagcacatgttgactgctcacccgtcaccatatttagtatgtgagagtaattgtgacagaccatatttattgagaccttcctccccaaaagacgctaaactaagcgagcacattagtccgcagttgagatcagcatcatctcctgccgggggctactgcggtgacctactagctggcttgtctttctctactgaagtccctgcacagtctgccacccacatggtcaccagcacctttccgaaactttaaattgggttgtgttgggatcagctgtccacggtgtgaatgcttcctgtcatcctcaaatcctgccactggcttaaaagatgccctgtggctgattatgggacggatcccgggtagggcagtctctggatggtctttccttccatctcagctccaaactttgtctctttaactccttccatgggtattttgttccccattctaaggaggaacgaagtatccacactttggtcttccttcttcttgattttcatgtgttttgcaaattgtatcttgggtattctaagttttagccagcaagattttgctgataggaccctgatttagctgtctcttgtgaggctgtgccagtgcctggcaaatacagaagtggatgctcaccgtcatctatcggatggaacacagggcccccaatggaggagctagagaaagggcccaaggagctgaaggggtctgcaaccctataggaggaacaacaatatgaactaaccagtaccccccagagctcgtgtctctagctgcatatgtagcagaagatggcctagtcggccatcattgggagcagaggactttggtcttgtgaagattatatgtcccagtacaggggaatgccagggccaggaagcaggagtgggggtgggggggggttggggaacagggtgggggagtgtataggggactttcaggatagcatttgaaatgtaaatgaagaaaataactaattaaaaaattgtttaaaagaaaaaaaaaagatgccctgtggttgccttgcctgcccccacctcttctaggtctctaactcctcctcctgcctcgtttctctctggccacaggctctgagtcatgctcccccagagagccatcccagacgcatagcttcatttctcactctggtcttggctgatatgtagagccctttctggcctcctttctctgagcactgttttaatcacattttgtttgtttgcttggttgcttgcttattttccattcggcgctctccaatgctgtattccagattgcccttcattcaacaaatatttgtcaaatttttgctaagtctggcctatggtatagtcagtgagatggaagagctaagtttagatggcacagacagtaaggtctctgtgagagggtggatcgctgtgcagatcctgagaagatgaaggaaaaaaccaccaggcgtaaccagagagaagccaggtataagcgaacaaatgtcgtcgcgtgtggaggctctgagcaggaaagaaggggttgtagctgcagaggtgagccagtaggacaggaggtgatgtggctgaggaaagggcagaggcctcactggggagtcctggagagcacagaagccctcagcctgtccagccttgggggagacactatctgaagtgacttataatttatctgggtctctctggcccttagatggaaatgggctttaaatagggagggtcccattagcccaggaaaacccgcagtgccaggaggaggatggcaagacgtgttggactcagaatatttctttgtttaaattcattttatgtatagtaatgctttgcccacattttttgtgtgtatgagagttctagaacaaatcgcctagagcaggagttacagacagttgtgagctgctatgtgggtgctgggacttgaacccaggtcttctggaagagcagccagtgctcttaactgctgagtcatctctccagcccccagactatttcctcaaggcaggctgagctctctctcattgtctgggatccactgcctgttgttaattttgtttgaccctgggtatggtgggtggaactctcatccagcggtaggctagagtagagttgctcacataacagtgtggggggggggtctcaagaacaagactagaaataccaaaactttgtaaacttccatttaaaacgagcacaatacacattactttatgctattcaaaacaagaggtgcagccatacccttcactcctaatggaggtgcagaatcatattgtaaagaatgtatgtaaagagacccttcatcagaatcatccatccaaacacatgaggtggaaggatgaatggggtttgcatgcaggtgtgttcagcccatagccagtggccttcatagcccagaatgaataggtgttgggagaggccctttcctggggagacagaaacaagggctcctccatccacatgagatcccagcaacaaatccaaatacaattccaccgaagataacccaaggaaccaatgagtttttaaagatgggttgcccacaagagcataggtaaccccaacacagctgaactggaaagtcttggccctgcatggatggtggcttccccttctgttactcttacctagtctagatactctagctcctttctgagggacctctgaggccataggtgtgcagttagggcctaatgtctgggagaaacagctggaatctcagttgagatctggcctctctctctccagctcctcctcctatgacagcaacattatcaactctcaacaagcccgacttgatggtgctggtctcttgcaagcaggcaccagtgatccactgagtatgctggccgtctcacacagaagaccatattctacaacactatgtgtgcactccagtacatgctgagaccgcagtgtcggcttgtaatgccagaagtttggacaccccttgtagaaggaggacgtgagggacgagtagcagtctttgcatctaaagaatacactgccttgactttcattcccccactcccagtgccccccatcccccacctcacctcccaaccatcggagacacctgaactgcaagattctgtactgcctgataggttttgacatttggcctgcccttccctttcagcaagaagaacatcagtgaaagcacacctctgcttgtcctgagaggtttggagtgaaatacaatgcgttggttggcacgatgcctgccatagcccctgtttctcctttcacggtgatcgtggtcaccactctggtgtcccccacagctaatgagtgtgcccttccctggcaggattacgcccacatgttgacctgcatcaccgaaagagaaaagttcattgtgccggtaaaagccagaggggctcgagccatcctggactttcccgacgagctgaatttctccacttgccctgtgaagtacaacacccagaaggttctgctggtccgaaacattggcaacaaagactccatgttccacctcaaaactcgcaggtatgcattcctgtagctcctgactttgattgattacagctaactctggctggcacaagtttgaatatagcactgggttggagtgggtcggtgggagtcggtgggtgggggtgggggtggctgttgcttgttaccgcttcagctaggagaccttgttgatgcagataaggctgtctctttatcctgaacattccaggttatccatttcttaccaaattttaccttctttaatacagaagataacccttgggaatgtataagggttagtttttgacataggcttttggctggattagtttgtcattggtgatgtgtcagattatcatacattcagtgacttcaagcaatataaatcaatagtcccatgctgctgtaataatctcatgttgccatagatgtcagcaggctcttagcctttctggaagcctgtgaggagaacagaccccttagctcttcatcttctacagagttatcaatatcccttgactttcgatcctcaattcttttcatcagagagagaggggggggtttagggggagggggagagagagtagggagaagctagaggagctgcctcaaaaagcagccttcatccctggacccaaatcctcaggcagtcttcaaagagattcagaccaacttcctaaagagtcttctacctacccccccaaaacaaaggcaaagtctgactttgaaaatgttttcagaggttgcaggaagtttcacattatgtgatttagttctgcatagcatatattgcaaggagcatggaagagccaagtatctgtcaaatcatagaacagactgcttcttaactctgtcccagagagagagagagagagagagagagagagagagagggagagagagggagagagagagagagagagagagagagagagagagagagagagagagagagagagagagagagagcttcagggaggcatggcttcattcaggatatgtgatcaggcttaaaggcacaagcccatgctctgacaatactcagtgcctgtgactctgtaatgttacatggtgagaagggactgagtttatagatacaaataagactgctcaatatctgaccttaaaatgtgatagatcgggccgtcctagaggcagaggtagacagatctctgtgtgtttgaggccagtcatgtctgcaaagtgagttccaggacagccagagctatggagtgagaccatgtctcaaaacaaccaaccaaaaaaacaatcaaacaaatagaaatggggcagatcaatataagttcagtgatggtcccaatataaacaccagaattctaggaaaataaaacagagttcagagttatgtatgggaagagaactccacctgctacaaccggctttgacaatgagaaagcttatgtgagagaggttgtatcaaggacacaagggtaataagtgatggggttgggttggtttcaatttgacattttattgcatttctacagtgttctgaaccctgtggaatagtataaagcgagaccatctctgctttctcatgccatgcaaacctggtaaccttcctttagtccctggaacctatatgtgaacatggttgaagaaaacctattgtacatagttgcccactatcctccatatgaatactatgccaggcatgcacacatgcatacactagtaataataaacaagcatacacataactactttagggagtaaaaagaaccatttgttatgggcatatgaatgatggttatggagctggtgagaaggctccagggttagagatgtatgctactcttgcagaggacccaggttcagttcccagttcccactgtgggtggatcactaccacgtgtaactacagatccagagcatccgatgccctctgctggtctctgtggacaccgcacttatatgtgcacattatctattcctccctcgacacacatattcatacaatttaaagtacatctgcagtggtggtcaccagtggggtcttagcaaggatgatgacccagagagaaggcagaagatcaagctgaggcaggagatcaagtggttttctatgacttatgatgtgtgagctcatttttgaaggattttctctgttgagtccttttcctgcttgaaggatacaggtctccagaggaattagtgtttctttccacgggctcacatctatctctaactccattttgaagggtttgtcacctccttctggcctctgtggcctcctgcacactcacagtatatctaaactcctgcaggcatacatatatgcatacaaataaaaatatttaaagcagtagattgatatttttatacataagagaagtcatccaatatggaaagacaaagtcaggcagactatcttcctggatcagttggctgattcttacatttttcacttatcagtttcttacatactagaaacctgtaaatgctaagccaaaagaccaaaacccaaaccaaaataaaacaaaacaaactcacatccagcagtgcaagattgctgaaacagatctaaaggcatgtcttttcatttagccaggtagcttgcacaaatcatcctatattcttaacatagcaatcctgggttaaaacaaagagtaaactcagggaccagtgtggagtcacaggcattagatcctggtccggccttcccacttaatagctgaaggtgtgagaaagaactgacctatcacattctctcaggaggttaacactgaggctgtgttagcacacatcggctggctcagagcttgttcatggtttttctgtgtggctttctttcctgtgtagcccatggtgttcctagcctcctgcatcattggactcaattgtgtctgaccatgggtcaccagaaggagactaggggacttggagctggggtgttcctagtccctctccatcttcagctgaatccccatctaacctgccatcagactggcctgccatcagactggcctgccactgtttaaacttctcctgacccccaggatctgataacactggtgcctccttccttttgcttccagtctaaggctgggaatgtctagctgctgctagccatccctggatatgctaagctgcatttctcattttgcccatcttttgtgtaaccaagtctctcgaatccccactttgcaaagcctgctgttttcctctttacctgctttgggaagctgatggtctccagccacattgccagtgcagtgaacaccccaaatcctcccagcctctcttccagcaatccctttttctgaattagctacactcggcttctgctgtttgcaactgagactcctctcaacggcagtgagcagggatgtggatggattggtaacttgttggatctgtggatcggaatctctgcagagaccccccaataggtatctttctgaaaaaccactcaggcagttctgcctcccagacagagggctcctgtcagcatgattcttaataaagacaacaaaggtggagggggtgacagttgaggactttcacatccaacgcctctcatctcttagtctgaacaccctgaggttctggatacaatgagaaacagctcatggaaaattctgttaaaaacagaatcttggttttgttctcacttaaatgacgacctaactcatttctaagatgattaggtttataagaaaaaaaattccctcatgcatctgtgggcttctcagatgcaagagttgtatctggctctctcatctgtgtgtgctcagcacctagcaaatgtctagcataaataagtgctcaataaatgtttataggatgcctccccaacaatatatcacacaggcaaagctgcaattgtaaacctccacaatcacttaaactaaaaatacatgttccaaagactataaagtgggcgtaatggtttcttcagtaatacagggagccacgcgctgtgctataaactatacacaggacatcaacaattaccattcagctttattacgaatgtgacctagaactctagcaggtcacacaataactttggctactaaagtgggattaatacacggagtggatcagagaggatagagaagcaacttaaagatctaaaagctcaagttagaagtaaaatagcattggggagaaaaggtaaaattatgattttttttgtttgtttttttgagacagggtttttctgtgcagtcctggctgtcctggaactcactatgtagatcaggatggcctcgaactcagaaacccgcctgcctctgccccctgagtgttgggattaaaggcgtgcaccaccacgcccggctgatcttcatcatttaatattccaaggctagactcatggtttttcagaagaccaagttccttccataattaagaatttgatactcatgagggggtcatatcaaaaccaaacagtttaatagacaaagcctgccttggaccccccccccccagaggatcgccacttctcacttctttgtgagtgagtttcctgacacttgatagtttgcaggcagctcagcctgaaggcccctagtaaaatgaagtgcaaaatcaaattacaggccgtgattaagcaagcaccagtgcctaatgcgctctatccaattagcatctgatttagcaggagagcttggggaactgcaagaggcaggcgagggccatcccagatgactctcctcactgctgaagaagtttagtgtaatctaaaactaacaattagtgtgcagggaaagcatccattaccactttatagaatttggaactcctgcaggtcagtcctacaggcccgaccctggtgtcaccttctctagagaagattagctgaggttctgcgataagataacctccaattcatttcaaaatgttctcttgctaccaaggtgtatttgagaggaaaatggaggttcaataaaaaagatattatcaagtggagaggcaaagataggagaccttaccgccatgttattgtcaaagccaggaaactgggccccatcctctggggtcagagtcttcctgaaccagaagggaggaaaggacctcagactttgaaggctcatcttcttccacaaaggaaggtctccttggctaccgaatgtttactccttttctatcccaagacattataaaaaaaattaatgaacaatggcaaatgttttattggcctttgtgatttgactgtgggctaaggggtgcaactcggtggcagagcgtgagtctagcatgttcaaggtcctgggtttgactcccacaagattttaccataattccatccaaccgcctctgctgtatgctcctgtagttagagggtggtgtggatggcagagacccaattgtcaacatgcacacaggactcccacaagcagaagaggcctggggagggcaggaagtacccagcctggaggcaaatctcgctctccccctcccctctatttctgccacaattggacaactttaggcaaattactcactcttaggggaacctgttctggtcatgtttaaaagtcaagtgtgttactacttacccaaggtattttgaatgatttagaagtgtattatgtgtagaacagccccatgatagagtgtccaagccctcaccctgaccacccaccaccaggtccttcctctggatccttcctgtctcttctgcacttcaccttgtaccagaattcgctttcatggctccttctctcagtagctaagaacactttagaggatgggaggaaactggaattttcaagagcactactctatgtgcagacccacacaggtgctccacacacgtagccttccttctctgcgagcggtgacttttaatcaaagttgaggtcagtcatacatagcaaaaggagcaagcatcgcatgagggattttctgagaggatccccgcagtcccaggctgtctatgcaggaggcacagtgtgcttggacagagcaggagcagtgcttgtgggtaaagagagcaaagcctcaccacctaccctaccccagctgactgggagtgtggcaaagcatacagggagctagacacatgtgaacatgtgtaaccaggacgcagaacctgggcgggaacagatggcatgtgacattgaatgctgagggtttgaactgatagatcacaaggcccagtgatggtctctgagcgggagactcttaagtcatgttgcacatggtgtgtgtgtgtgtgtgtgtgtgtgtgtgtgtgtgtgtgttacactctccccagagctgaatcagggagagggagaaagggcagggatacaaggctgaacttaactaaacagccaggtgtgtcgttgggtttcttcttcagcatccctggaatgcccgtgcaggaagataaaatagcaataacagcaaacattcgcatcatacaatacctctctgtgccagacattattatcaaacattttacctctgttgaccctttactgctcactgtaaccttatgaagcagaggctgacttgacccatttctagatgagaaaactgatttctaaatgactggtccaaggtcatgggccagccagactttgggctcattcagccgtcgccagaggttagtttagaagcaaacaactccagggcacccaacagtagtgcagagggcccactggagagctggtatcgtgagttccaggaaaggagagaggaaggaagaaagaagatcaaggaacggaagaagagatccaaacagggggcagcagagaaagcgaacaggcattttctctggaggccacagaggtcctagtaagtaacctggggtacctaatgtgacccttgtatctgctctgtacccccgtggcagaaagcttgggttctcaggagctgagttcattatctacaggcagacttaagggatggtgattctaaatgccgttacagtagatagatgtaagtcccgggaaacagctcagcctgccgccacactgcccaacacattactttgaaaaactagcaatttaatgatgtgcagtcgaccatgaaaataactaaatggtctggatttcctgtttagaagcaagagctctgtgagtcgttcgaggtgcttcatgatcgggtccagcttgctattctcttccagggccaccaagagaaactatctcccactgctcaggtgtccccctgtgtctcaagatgcagaactctctctatgcacctccacctactaactgcatcccctacccttccttgccttgtgcatatccagggagctgacctctgtggtgtggcttaataggtcttttggctactaattttgcctcaaatccatcatagcagtgagggtagggaagagcaagatactccccagcacggtggacactttggtggcccacccaggtacctagcccacggggtggtaccacctgcatttaggatttcgcctttagtccatcctctgcagaagtaccctctcagacttacctagacgtataccccagtaatctcataggccatttaaagcctcagccaacttgacaataggattagcagtcatggtatggtttgctttactcagcttcctaggctgcctgcctccttttgctcactaggcagccatctcctgggattcctgtgcaggtttctaagtcccccaacccctttctcgtgacttcttcagcctatagacagtagcgactgttaggaatcgttacagacttttaaacatgttaaggtccctgcactcctcccaatctctacaataaaaccttgttatgctttcccagtacctctactctgctcttgggactctgatacaattttccactactaagacgctctctcctctgagttcttgctatacctgactttcaacccctggaaagaagtattcttttacaaacaacagtatttgcatacagatttcagtctatacttaccattttattcccagcaggactatccccctgtcccccacccccaaattaaaaaaaaaaaaagatctgaaagacaagaatacaaacaggatcatggtctggctctcatcttgctggtctattgctgttattttgatattaaaattactcctttcacatcggcaggaaaatcataccacactcctagactgggaaggtagctgtgagctgtacaaatctagaactcgtgtctcctctcctcgtgcagagctaatgagaaatgggctctgacagtgtctccatatattttgcagtccatactcagtagagccaacgggcgggattctcaacgtgggcgaatccatgcaactggaagtggattttgagccacagactgtgggcagtcacgatggaaaactcattgtgacttatgacacaggtatgctttttctttcttttttttccttttcacttcagttctacatagtaagaaggggcaaatggaaacacatgaggaagctaagatcccttttggtggcatgagcttataagatctgaaaagtgaagggccaaccacatatgaatgttcccaccagaaatgatgccaagtcttgtagaattcccatccaattggctgccccacactgaaagcccgaggaattcgggactcaggatggaacctacactagaaactcacaatgatgggcagaggttgtgaatgtgtgcttgcaaacttgaaggtagtgtccctcaacccctgtgtgctttctgtttgatgtgtagctccgtttgtctgcttttaaaatgcatgtaaatcccagttcaaaatattcttgtatgtacccagtactctacttaaaaattcagtggtctcaatccttgcatcaagcaagtgttgtccctaattagcatctcacataaatcctggactgtatctgttgccactaacgatcacatcctgggaattacattgggttttggttttttttgttttttgtggtatttttctaatgtttcacttgcagccatgtagactgctgtcatttgaaatacgcagatgtagaggtacacagccagaatagagctagccataacatctaggtcacaggtcagagttggtggctttgtacctttgtgtcagagcaggacaattccagcccttcccttacgacccgtggttaaatggtcctggctcgaccttggccaacacgacagcctcacacagccagtggcatggcggaatgtcttacctgtttctgtcagctgcaattcactggctgccaacccaaggtgacccagcttaaacaaaagaggacccttttgacccacacaggtaagaacacttgtcatagcacagcaggacatgactttccaaagcatctgggccggttttacatggagtccgccagcaaaggctgagagttgcagctgcctcccattctcagcactggctgccactgtgttcgccttcaatacactagacctgtagcctggagtcaaaagaacggcttcaattttcatttctctaatttatgacataagacatcttttcagggataactggccattcttgtatcatttctgtttgtttaaatcttctgcttgtttttcttttattatgcatttataagtaacctaagtaaacaatctaaagttactcatcagaaagatgtaaggttcttttctcccaggatacagcatgccttttaatttctccactgacagttcttgatgagtaatgagttttaattttaataaaaatctgttgccatcttgtttttcttttcagttaaatttttgttttctccctgctaagaagtcagcctttgctattctgtggtcgtgaatatattccatgtttgtgtatatgagcaatatagttttagctcctacgtgtaggtgaaagatccaacttagacttaactttctgtgagagaccaggcatcactttcttatgcacactatcagcctccccactctcattaccttgctcttaatcactgttccctagtggacaccctgtgagattaaaacaatttccttcactcctggctttctatgattctcagtcttgggtggacgttgggtttctatcaaatgcctttattgacattaccaaagattaactggtctttatccttctagtatgatgaatgattgaaaatgctgctttctgatataaatacaaatgttcacttctgataaatcactgagatagatttgctaatggtttgtttgagaggttagcgtttgctctggcagtttttgtgtgtcaacttgacacaagctagagaaaggagcctcagcctaggaaaagcctccaggagatccagctgtaaggcattttctcaattagtgatcagtgggggagggcccagcccattgtgggtggagccatccctgagctggtggtcctgggttctgtagaaaagcaggctgagcaagccatgaggaagcaaaccagtaagcagcaccctccatggcctctgcatcagtgcctgcctccagttcctcctctgtgtgagctcctgtccagacttcctttggtgatgaacagcaatgtggaagtgtaagctgaaaaatcctttcctccgcaacgttctttttggtcatggtgtttcatgacagcagtagaaaccctgattaaggcagtattcaaatttgtaaggaaaaaaaaactatactctaattttctttttatataatacctatctcagattttagcccgatgaaacaaattggtctttaaaaacaaacaaacaaacaaacaaaaaaaaaacagaacataaattttgagtgtacaggaattattatcttcttttattctttgagagagccccttttaaagacttgtgttgttacttccttaaatggctaagaagttctctgtccaaaccatgcttttcttttgcaaaagaggtgcagattcttaatcactggctcccatttcctaagccaactttaaggatattttgccatactttgagatcttaagttccaagctcaggattgttcagagcagccactcctgtctttgtgatgctgctaagcctgctggctgtcctccttcctccttagccgtgtggtctatcgctgtggctgtattagttttgttcacgtactcagagggccaactttcctttgatttttctttacacttcacattttttcaaaccttatttatttttcttctttattatttccccaggcttcttgtggtggttctcagccttagggggagtgcttaaaacactgacttttaacatgtactctttcagtgtaggacccccgatatggggacccccactctagtccagggacaggatacacccacgaacacgcaagaatccttcttgatgcaaaatgcacgaggctttattggcagagctctgggccgacatgtacctcacacaggaggcaggggagtctaccccgaggctcggaagctaggggtttttatggggtaaggggcttaggggtgtggaattcagcacagcgacacactattggcttattcaaacattaacagaaagattacatgtcagcaaaagggcatcaggactttgttcctgtgggctgggggcttatctttgttcacatagcaaccagttgatgtatgactttacccatcatcaaggggcagtagacagaggggaggttccggccaggtggtgttgactcagacaagataaccctgcttgtccttgcattcttttctgctttgttttcaggcccaggcctcgggctcatagacagactcttttcatcagcactctataatatgtacactttagacaaaattcttttatctaaagctggctttatcttcaatgcatatattttagtaggcctcattttcctggaaagttaaggatttaaaatctgctggttttagtttttcttaggcccaaaaggtatttagcaaaacaatgaataatcatcaaactcttgggagttttatagctagttgctttgtatttttttgtttgtttatttgtttttgatttcttctttaattctaccagtgacagaaaatgaattcaatatgattttagtcctggaacccaactgcagactaacattatggcccagaatgtgttcgagcttggtaaatgtttcctgtatttggagcaggttacatgcttcataaatgacaactaggccaagcttactagtaaccatggcagttggcctatagcgctactaactttttatctcttttggacagctggtaaaagttactaaaaatcacaagtataattatggatttagcatttcaacttttgtaccatcaattttcacattggcattttaaactataatgcttgctatgtatacatgttgtattgatgtaacttcctgttgaattaaccattttattatgatggcagcttactattagtgagagtgctggcatttgtggagtagaaaagcttccttttgattaatgtggatgtgcaatgctctttctaatccttcgctttcaatttccccacgtcttcttatttaaagtttgacatttagaagaatcaatccccaggtggatattttttaattgactctgaaaatcatccttttatgttattattttatattattattaaatctttccatttggtccttttatgttgaatgagattcctgacacatgacatatttggattgaagttgctgaccactgttattataagcactgtgggaaaaatgataaattgaattttaactgccaccttcctattattagctattggtgtcactaggtagtgacatttagaaacgagtgcttatatactcaatcagtgatgtatttttcccatcttgatatccacaggtttatacaatatcaattttggttttgtcagcccataaaactaatgtatcaggggaaaaactgttgccctaagaattaccttttagtcacaacacacaaaattttaagccaggagtctgaaagggaataacatggacttttgtcctcacaaaattattagtttattaaaaacttacttttaaaatactgctcatttcatttttaactcatgcttgtaatgtgataatgtatttaaatgtatctaacataaaatgctctaattttggagtataatttgtgagtaaatgagtcttaatgggttgcagtataatttagaaaagtttagttaagttttgagatcagtcattttaggtattcacatgatagagtcaaagcttgaaaagccagtcaaaatccgacccagtcaagatccagtctaatctagtcacaatctaatctagtcacaatctaatccagtcataatgtaacccagtcagaggcaacccagtccagattttaaggggaaactggagccctgtgacattgagtggcttcctgaaggctacatatctcatccaacattcaattaaaactcagatgtggactctgagccccgagaactgtcctttcccacccccactcccaccccagggccatctccctaaccccttgtattacttactatacaaccactttcctctttcattctcggcctttgaaacgcaagccattttcacagagggcctggattccggtttcccttcttagaagtatctggagtgatacctatacttacactgctatcctgtgctgaaggacaggcagtttgaaccacagtgaatattttgtgtattgaagctttgctagtctcggagaagttcatgtccctgttctgaggtgcttttgccaactgtggaaaatgaatgctcgttctgaagactaaagacagtattgcttgcatgaaatgggctgccgataagactatgctctcttctgtgtggtaggttatcagtgggcagaaccttacattagtggagagcagtaatgactgcctaagctcaggcctcatggagcccgtccagacagcagtggtccttgtcttcccgtgtcacctcgtaatcacgagactgagccctctgcagctgcttgaactatggactgatttcaggacggacatttaatatgggctgttggtgaatggcttttctttatgcttcctcaaacaaggttctagaagaaagctcactgaattctcctcagcgggaagtgctcagtcatatttccaacacttgtatttgtcccgtcagctgcgtcctccccctagatgtgttcttgataaaccacagctttcagttctgtgttttctgtgacaggggtttgagccagtgccctggttacttaagggcgtcaaatgtagtgcttcgcaaatgcctggtatttgcccactcacatttgcctgaaccagaattctctccacctctcttccccctctttgtccttggagtgttaatacatagtaaaattgagtttgctcagacagctgctttttctcagatataagttacctttaactgtacactctgtcctgcagaagagattacacatagaatttctcaaagttatactgataagagcaaaacaaagcaagcaacatgtggtggccctggccacatgggaggttcaaggccaatctaggctctctcttctaaacctggaagaatgcgacaaaagcaagacatgttcaatagtgtcattgtatgcctgacacatgtgcaatagtgttgttgtatgtctgaaacctgtacaatagtgtcattgcatgcctgactcatgtacaatagtgtcactgtatgtctgatacatgtgtaatagtgtcattgtatgtatgatacatgtacaatagtgtcattgcatatctgacacatgtgtaatagtgtcgttgcatatatggcacacactcatctactggggccatccactacctctggcttttctgagatggtccctgaacctttggtggaggggtgcagtatagagtctcatttaaaccttagcactccactgtctcttattctctgcatgaccagttgtggatctctgtgttgattcccaaccctagtcgaggagccattgtcaatgatacctgctgggggtcagggaaaaagattcctttttttttattattcagggatgcagcctctgagagtctacccacgctccagtagatgccctacacacatgtgtatgcaggcagcaccaagagaattcagtgggtttttttttttaaatgagcacatgacattgggaggggaaagtggtagggggaaaacttggaggaaggaaattgagagaggatttgatcaaaacacgttatatacacatgtgaaagtctcagattttgtcaaataaaactgagaggtggaaacagcacctgagacctgcaggacagacagacagctcagcgactcaagtcctgaaaccttcagctgggtgctgaggaactttatgtaacctgagggctcctagagatgagtagtgtgaagaaacatatagagaagacattctgcaaggctacaggatggtccatatcccccactgttaggagtctcagctagagtcaccatcacagacatcctggaatctcccagtggagggaaaaggataccaactcactcacaaaaccttctatccaaaatttgtcctgactacaagatgtgcagagacaaagatgaagcagagcctgagggcacggacaaccaatgtctggccccacttgagacccatcccatgggcaagcacccatccctgacactatattaatgatactctgctatgcttgcagactagagcctagcataactgtcctctgagaggctccacccagcagctgatcaaaacaggttcagagatccatagccaaatgttagacagagctcagggaggcttgtggaagtgttcaggggaagagctgagggacctggaaagagtagggactccataagaagaccaacagagacaactaacctagacccttggggctcccagagactgaaccaccaaccaaagagcatacatacatgggctgaacctaggcctcctgcacatatgtagcagatgtgcagcttggtcttcatgctggtctcctaacaactggagttggggctgtccctgactctgttgcctgcctttggatcccattcccctaatggcctcagtaggagaggatgtaccttgtcctgtagtggcttaatataccaggttgtgttggtacccaggggggcatcctctttcttagaagagaaatggggaggagctgtgtgaggaggtaactgggggagctgcgatcaggatgtaaagtgaatgaataaatataaataaataaataaataaataaataaatggaaaaaaaagacactcatcactagcccatattaaatgtccttcctgagtttagtattcacaagacaatttcattgtacataaaaaaggacatttttgctgaacatttggttacttggatgagccagagaaacaggaaccaatgcccggtgaggtggttgtccccataaaggtgacattaaccactgtcagagttgggaaatggagctgtgggcccgctcagcattttatagcattacatctcttgttacagaggagatatttcagtttgggagccagacattggtcggtaggcttttctcccaaacgcaagatgatggatgggttattattagataatataaacgcattcaacgatcattatactggttcttcacagggcggcttaccggtcatttgcatgtttcattttgttctactttctaaagatacaaaggaattctttttcatccccgtgaaggctaataaaggaatcccggaaagtaatacggtgagcaatggagcccgatacactctgcaagcggaatgcgtaaatagcacccgtcctgagcatctctgcaaactcgcctgtgtgcattccctttccactgtgtgtctgcagaattatgatacactattataattagaatgtttagagacgtcaccataaaacaaacattttaacatggctgaagagtcaagggaagccttctcagacctagttttcctttcgctattccttttctttttctttattcgagacagggtttctctgtgtagccttggctgtcctggaactcactctgtagccaggctggcctcgaactcagaaatctgcctgcctctgcctcccaagtgctgggattgaaggcttatgccaccactggccagcccttttctctattccttattccttggtttaagataggaatctttggttgtcagggatgttttatggggaagagtctcacatcactgggtgttagcatttaaagggacagtagaggactttgccccagggacagaggggggtccagacaagacttgctactgaactctatcgccagcctagagggtgttttgtttttttttaatttctttttattttgagattataatataattacatcatttcccagttttctttcctccctccctccacaccctcctgtataccccctcttgctctctttcaaattcatggccttttcccctttaattatttctacacacatgtgtgcgtgtgtgcgccctaaatataaccagctcagtctgtatattacttgtgtgtatgttttcagggctgaccatttggtattgggtaaccagttggtgtgctcctttcctccctggggaggactattccccacacccccacccttgctctcagcattccttagttgcctgtagttctttgtgtagggttgagacctcctggtcttgcccctgtccgtggtaacatgcccactgttgttctggttcaactcccctttaggcagtcatgtttgtgagactttatgtgtgtagcttctgacattattactaggcggcacagtctcacaatcccctatcctctggcttttacagtctgtctgtcctctccttccatcctgttccctgaaccttaggtgtggaagttgatttataaatgtatccactgggactggactcctgccttttgatttgtcatggttttgcgtaatggtctctgtctcctgcaaaaagaagtttccttgatgaggcgcgaggactgcacatagctgcgggtatagagacaaacatatagaatggggttagggattatgctggtttggtaaagcgtcagttgtcaggtcttcttactactagtcctgggtagttgtctaggtaactggtaccaggcatgacttccctcctgttgagtgactcttcagtgattaaagagctgttggtgaccattaatggatgcaggccactactttacccagaaggttatcatgccatactgggcatcaatgtggttcagagacatcatagctgggtaggactgttggttgcccctctcttttagagaccagcatggagccctctggtaccaccaaagctagtcctcagggaggtagccttcaggtcagatccagctcggcctctggcccctgcatctgaagtacatggtgtcttcaacaatagaagcattctacttctgggagggggcaaccaagggcaatactgacagtctatagtgtttggggatctattggaccactctgatcaataactcaaagggggacttttgagtgtcccggtgctgggggttttgtttgattgtctttggctcttagagggagcattgtcagctcagatgagagaatttcatttaaactatacatgcatatttactatacatatagtatgttactttaggtagataattaatagtatgttttcttataagtttttcatgcattcttacttttctcctgtatcttccccccacttctttattagatccccttttcccatttcccattttacacttgtaccctgctatgtcctctctattttttcccaaccctaccatggcaatggtctccttctcttctttccttttcttttctttcctttccttttcttttcttttcttttcttttctttccttcccttttcttttctttctttctttctttctttcttccttcctttctttctttctttctttctttctttctttctttctttctttcactctttctttctttctttctttctttctttctttcttccttccttccttcctttcttccttcctcctcttccttcttctccctctcccactccctttcactcttctccttctcctcctcctctttcttctttttctccctcttcctccccctctcctcctcctccttctcttcctcttccccttcccctcttccttttcttcttcctccttctttccttctttccctttcttgatttctgtagtcactcctgagtatatactcatatcttaacattttggagtgacatttgattcttgtctttctgggtttgggttacttcactcaataccatttttttctagttccccccattgacagggctagaccctggggaagaatgtgggagctagaggacatgtctttacctctttccgtcccagaaaggactgagtgtacaaaccccgggcacattaatgactgtgcccaggtagagccagagcttgaacccaagtccctgccatgctctaagccaggccccatttacaaacctgcactgcctttggttcagaccagtggcaattttagtcttgtcgctgccatgctggacttgtggtttgaatttgaaattcccccataggctcatggtgcccagctggtgtttggggaggctgtagaactgttaggagacagaggtttcctagagggagaatgccgctgagaggcaggtcttgaggttttatgacccagcctcacctcctgtctgttctctgattcctgactgtggatgtaatatgtcaattgtttcaatctcttgcttctatgcctccccgaccacgtggactatatcccctcaaactctaaataaacccttccacacttcagttatgtcctgccagatattcgtcatagtgacaagcgaagtagctcacatagctggtgagctcagattgccccattttagcttcgtaaagaaagggatgaggaatttgcattgagcggtatgcatatgacagtgctaaatttgactctgctgtggtcaagatctgagcagcgttcattcaccctccccaacagcttgttcccttgagactccatagctccccgcatccatcttatttcatatacccacatcctctgttatctccaagttctaaagccacggtgggggatgtattgtgcacacagctagcttcacatttagtttggggaaattagttttgctcatgtttggctttgtttgattgatagtagtaaacctggcaaaatgtaatatgataccttccacgaaatttatttcttcctgggacataataaatgattcttgcactgctgcacccaatgccggaaactgaagcagagtgggaacagggagtccaaggacacagagaagtgccagcatagatgcacacagcctctgcatccccacaagcacgccaccacctctatcctgtgcctcttagatagctagggtatggagaaccctttaaaggttgcctttaggctaatgcatatcaaaacaagtatcctaaaatacttggggacaaaaagaagagctgtcactccctccttgtcttagttactcttctattgctgtgatgagacaccatcaccaaggcaatttgtagaagaaagctttcattggcggcttacagtttcagagggtgagtccatgaccatcatggcagggagcacggcagcagcaggcaagtagggatgatgctggagagcagcagagagctcacatcctgagacacaagcttgaggtacacacactcatacacacacacacacacacacacacacacacacacacacacacacacacacagagagagagagagagagagagagagagagagagagagagagagcatgctaactggaaatgatgtgtaggcttttgaaaattcaaagcccacctcccagtgacacacttcctccaaaggccacacctcctaatccttcaacactaattagggactaagcatttcagtatctgagcatctgggggccattctcattcaaaccaccacactcctcttctatggatcagatggattttggaaagtagcgggggtggggggggtgggggtgggtggggggggagttctaggaaaaagacatagtagctattgtatttctggccaggcacattgttgcagtgagcaagccaacctgatcacactcattcgtgggatttgcggattggcgtgagataggcccttcagtcttctatccttcgactatttttttctaatacaacaaaacacctcaaatagccacagaaacagaacaagtaaagccatgttatataatacatattggctttaactcacctcagcaggtttccacacaagttcctttgaagggctctattttttattccttgtaaccaaaatataaatttgaagccaccttgttaccttttctaatctactgtccacatccaatgtaggggactttatgttattcctaaatttgcattatcccacgtgatgtgttatactgttactccatctttaaatgtcacagcatatgatgcagactgttctccacctcgatttattcactcagtgatgtgatttacagatttaaatgtataggcacacattatatagtataatatgggatttttaattttgcatgtatatacatgcctgtatatagaggccagaagtcaatgttgggtgtctgtctgttaccctgcctattattatttgagacaggttctctcattgaccctagaggcaccagttgcctagactggctggccgtgagtgctgggagtctacctgtctccgcaccaccagtgctaaggttgcagatgcacaccaccatgcttggcttgtacacggatcctgaacttagcttctcgtggctgtacaaaaggcactttactgagtgagcccactcctcaggctcccaaaatgccataagttatctattctcctacaggacatttaggccctttctggtttttctgttattacagacagtgctgccctgagcatccttgcacaatgtcctacagctgggtgagattttctttttgagtaaattcctacaggtacaatttctgggtgacaaagacattttatatgacatttccttgggtagtagattgacccaagcaactctaccaatttatattttcctcagcaaacatgagaagttttgttttccacatctttaccaatctagtaccaacagggtactgtgaaactgtttaatttttgttaacatgcttgattatgggatggcatctcagtttacatttattgtattattgggcagttttacatatttattgtaagctctataataattataataataattcactaaagattttagatgggatagtatatgtttaaaaaactgaaacattgccaaagtatatattgctttcatatgttcccatttacccagcccactaccattttattagtttcttgaacaatttttatgcaaataaatgcaaatgtgaatgcacagcatcttccttccgcacacagaatataaaatacaatataagttgttctgcatacttttccatctactactgcatccgtggatcctacctcaagcctgtgtgcgttttatacacacactgagcacttctttcggagggacggtgtccttctggcccataagtcacattctcactccgtgcttcctaagaacagcgccattttaaacacccagttcatctcggaacacattcccaggagtgagacacagagccgacaggatggcaatgttggttgaattttgctccacattaccaaactcaacgccgggaatggaaaaggatagaccatttcatgtttccttcccctctgacaagaaactgcattttcaaacatttttttttaaattttaaccaatttagtgtcaatatttatttgtgctttgatggtcctaatataagctcatttttatttgtgtgtctttcattagagcaaatgtgtgcatcttttcagcatacgtagcatctttttatatttccagctttgcagccttatcccaatctattgaaccgttgtcttgatttttgaagttgtatttttttctttttaatagtgtttaagatttccacacaatgtattttgatcatattcagcatctctctctcctctcagaccctcctcttccctacccacccaactttgtgtcctcttaaaacaaaaaccatcatccatagtttgtgctaccggtgtgctcaggcatgtgttgtcgcctaccggtgtgtgttagttctactaggggccatacccctaatctagactgactctccttcccaagcagcaaccagttgccagtagatccttatctaggactccccacctctccaaaccctggattgtctggcaccagctagtgcaagccttgtatgtgctgccataactgttaatttatatgtgcaactgccctgctgagtctcattgtagccatctgccacctctggccttacaatctttctgtcctttcttctgcagccttgggataaggaggcaatatgacatagacacaccatttagggccaagaattccacagcctctcttttattctttggccagttgtaagtctctgttaattaccatctactaaaaagaagcttctctgaggagggatgagaggtgcacagatcaataggtagagctccaattaagtcattagaagtcagtttaatactatgaccacgtagagtaatagtagcaggttcctgctagggtctatgacctacccatccatagtttctctctacattcgtatactctccatcagatgcataactagtagagatttctctgttctgtgaggtgcctcttcactcaaatgatggtgtctttgctgtagagaagctttgtactttcatgagaccccgtttattaatttctcttctttacacctatgctcctgtggtcctgttcaggaagccctttcctgtaccagtgaggaaaatccagtccctaccctgccctctaccagatccagggcatcaggctttgtagacttttcaaactgtgttttcaattttgcaaatttgtttccggcatcaatgaaggacatatcatttcttcctttgagtcacgatagacttaaaccaaacgtagacgtgctattgtttaaaagcaaggagagcattatgaaaggacccagaaagtgaaagacactctgtctctcttactcctggtggcaaactcttcagctgaaattaggagaactggaggctggagaatatggcatcgttaaagtgctgagggaaaacgaggtcaaactgggccgtttttagcattccagtatccttggaaggtaaaaacaagataacgacatttttcagacaaaaaattaaaacctgaaaaatttttatagatttcctgtttgttatatttccccttggtcaggctgaagattacattccattatctttaaattgctgctatttcggttaacacatcaggtatagctctattcttttaaccaaaagatgcatgaattattcactttacatcctgatcacaccccctctcgccccttctctcctccctgtcctgcccttacaagcccctccccccattacctcctccctttctctgaggagaaggggaagtcccccttgggtaccacccatcccctaggacatccagttgcagtaggcctaagctcatcctctcccgctaaggcccaactaggtactccaggtaggcaaccgagtcagacacagtctccactccaattgttaagaatagttaaaatgaaaatcaagcttacacatctgctacagatgtgcagggagggggcctaggtccagcctttgcttgctctttggttggtggttcagtctctgtgagtcctcatgggcccaggctagttgactctgtaggtcttcttggtgtgtccttgacccctctggctcactcaatcctatcccctactcttctacaaaactgcctaagctctgcctgatgtgtggctgtgggtctgtgcatctgtttccatccttctctgctggatgaagcctctcaggagacagttatgctaggctcaaccatagcatagcagagtattaatagtgccaggggcaggctctctcacatgggatgtgtttcaagttgggctaatcattgtctggtcattccctcaacctctgttccatctttatccctgtgcatgttaaaaacaggacaaattttgggctaaaggttttgggagtaggtctattcttaaaggcagtgttttgtctttctctgctttcaggattttgtcttcaatttcctgtggtttttattgtaatatatttaggtatatatttcctctagtctaccccattttaattcctctgggttttggaactatcacctgatgtccctaattccaggaaactcttagccatcatctcttgaaatattgtcttggctagatgtgaccatctccatcccgaggtccccgagagtcccctacactcgtgttattttcttatgcttttatactttttgaactatttttcatttcactgatttctctcataaaaatagaaattctcttattatgggtatcctttaaaggttcttatcctcccttgcagtctttgtttcttgttaaattttaggccattttattttatttcatttttcatctgtaagtcctcaagtatggctgttcttcacattttagattcttttttagtctcccgttctctgggtacagctttcacatcatccattgattttttttttcttatgaacatgctaagtgtggttggtgtgtggtctctctctgatggtgcctggtatctgttcttggcgagcccacttctgttttccacgtgttagtagttctaacatgtgaggcttcaattctttgcaagcatcattatatttggctgtgtagtgttggaaaatttaaaattgtggttgtagatgcctcccgctgaagtagtagttctcaacttatggcagatgcaacccctttgggagccaaacatccctttcacagggtctgcctaagaccatcagaaagtacgaatgttttcattcacgcataacagtagcaaaattacagaagtagcaagaattttatgggggtcgggggagggtcactgcagcatgaggaattgtattaaaaaggaaggttgagaacccctgctctagagaaaaatgagttgttcctccgctttgtcccaggtcagaatcagtgagtgacataaactcgaagcttgaagtgttctgtaaagtgtaggcgatttcagcaagacagtctgacagtaaaccgcggagatggagggccatctccatccggttcaccctcgttttgggggtgcagttcttttagtaacagaatttatagggaaggtctttttatcttgtctactaactcataaatggagcccaatgtcatccacacttaaatatgcaaatgcgaacagtgagttttcaattatcacatttccctccccagaaagtctgaattctttttttatgaaggatgtccatggaaatatgggtaattcttacctctaaactgcaggcctaggcttttgtgaggagaatgaggcatttcagtttctttgtgcatggctttatagtgcttaaatttgattatctgtctatcaatccatctatcatctgttggtctacgtttatctatctatctatctatctatctatctatctatcatccatctatcatctatctatccgtccatccacctatctatctatcatctatgtatgtatgtatgtatgtatgtacgtacgtacatatctatctatctatctatctatctatctatcatctatcatccatctatcatctatctatctatccatccatccacctatcatctatgtatgtatgtatgtatgtatgtatgtacatatctatctatcatctatctatctatctatctatctatctatctatctatctatctatcatctatcttcctacaatctttaaactttatactcacaagtttggcgcttgctttttcttccagctgtgataaagttaaagggaacctgcgaaatcttatccgcttgtctagggctatgaacaggaacagcgacatgtagattactgtttaaaaatggtgaagaatgatgtatttgacctttaaaatctaaattaccactaaacttgcaaccaggtccatattacctggggataatatcagtcggttccacctggatccattgagcagctgcttgggagtatcctaccccaaagcagcgtctcggaactcaggttattgacttaactcaggtggctatttggctcatatgcgactgttaaaactaagaaactattgctgaaaacaaagggtgaattaccatgcttttgcaattctagttaaaacttgtacagcacagttatacacagtatgcatagtatttacgtctaccctttctctttttaaattttccttatgtatgtgtgttttctgcatatatgtcgttgtgccatgtgcatgtctgctaccctcagaggccaaaaggaggagtcacattccctgtaactggagctccagttggttgtgagccaccatgtgggtggtaggaatcaaacctaggtcctctgggaaggcagccagtgcttttatctcctgagctgtctctccgggcccttttctgttttaacactagagtgatacactcactgtagcccccacagagtcaagaaaactctagtttttgggtgtgcatcttcttgaatgcccagtggcctcacatgcctaccatcaagatagccgtgagtctgcaatagtccgtgactgctgttttgccaggatcctgagattgagatacttttaaagattaactcatggttttggttgttccttctttctatgtctctgctacccaggcacagtgtactgtgtgttgctgtcattgtttggacatgtaattctggttttgaacttactgaatctggtttctgacccctgtgggaacttaaaaatccttggtgctgagccactagtcccaagtgtatttgactggatcttttcagaaccagacactagatcatgctggaaccaaagacaaggcttgtgtttaaattctgaagtgcctggtcctcctggccaagttgtaagcctgaagaatatttatgaagaaaaatatccccagagaacatttcataataattcatattttatgtggcttatatattttttaaaaatgaccagagaagatagtttaatttcctgtaacttcaacaaagggtgataattaagttttctgatcatgtctgactctgggttgacggtctggaggacatataaaatataaaatataaaatggatggtccacattccctcacctcatcttgatttttttttaaggccagaagtatcattctagaattagtcttttatgtgtttacacatgtatgtgtacatgcctgtgcaggccagagatcagtgtcaggcctcaatctaccttgttatttgagacaaggtcacctttgtctagattggctgaccagtgaacccccaggaatccactggtctcctcttccccagcaccaaaactctgggcggtgcatgcttggctttttgtgaggttctgagaagtcaaactcagatgttcaggcttttgtgggaaatactttattaagtgagccttctccccatcctaggataaatcttaaagtgtctttcttccttattaatttccaggtgaaatggtatttgtatgtctctatggagttgccatagatgtgaatataagactggacaagaattcgttgatcatggagaaaacctacatatctctggccaaccagcggtctataaccattcacaatcgcactaatataattgcccacttccagtggaaggtgtttgccaccgaagaagaggaagacaaagaaaaatacaagtatggtgggggtaaatcaggttaatgtggggggggggaggggcaggaagcagtgtttctacagtgcattctttttttcataacatttttttaaaaattcacattaccccttctagtcccgctcttacagccccccacccatacttctccttctcctcagagaaggggaagtcccccttggctagcaccccatgctggaacatccagtctcagcaggactaggtatactctctcctaccgaggcccagcagtccaggtaggggagggggatcccgttcttagccatcataatgtctaaacctgaggcactggctctactgcagggtacccttgggagctttggaacatcagatgctggttgtagctattcagttacacttaacctggttatacggtagcagtaattaaagatttaatcggttttaaaatgacattctcttagacttgaccttagtacatggagataagaatggatcagttcgcattcttctacatgataactgccagttgagccagcaccatttgttgaaaatgctgtctttcttccactggatggttttagctcccttgtcaaagatcaagtgaccataggtgtgtgggttcatttccgggtcttcaattctattccattggtctacctgtctgtcgctataccagtaccatgcagtttttatcacaattgctctgtagtacagcttgaggtcaggcatggtgattccaccagagattcttttatcattgagaagatttttttgctatcctaggtttttttgttattccagatgaatttgcaaattgccctttctaattccttgaaattttgaattggaattttgatggggattgcattgaatctgtagattgctttcgacaagatagccattttcactatattaatcctgccaatccatgagcatgggagatctttccatcttctgagatcttctttggtttctttcttcagagacttgaagttcttaacatacagatcttttacttccttagttagagtcacactaaggtattttatattatttgtgactattgtgaagggtgttgtttccctaatttctttctcagcctgtttatcctttgtgtacagaaaggccattgatttgtttgagttaattttatatccagcttcttcattgaagctatttatcaggtttaggagttctctggtggaatttttagggtcatttatatatactatcatatcatctgcaaatagtgatattttgacttcttcctttccaatttgtatccccttgacctccttttgttgtctaattgctctggctaggacttcaagtactatattgaataggtagggagaaagtgggcagccttgtctagtccctgattttagtgggattgcttccagcttctctccatttactttgatgttggctactggtttgctatagattgcttttattatgtttaggtatgggccttgaattcctgatctttccaagacttttatcatgaatgggtgttaaaatgacgttctttgctgtttttaaagcactaatatacatgtgtgtattccttttcatagccctgactaagtttatcagctcttacagtgagtccccaaacagtttgttttgggctggcatcaatgtcacctctctctccctctctctctctctctctctctcnnnnnnnnnnnnnnnnnnnnnnnnnnnnnnnnnnnnnnnnnnnnnnnnnnnnnnnnnnnnnnnnnnnnnnnnnnnnnnnnnnnnnnnnnnnnnnnnnnnnnnnnnnnnnnnnnnnnnnnnnnnnnnnnnnnnnnnnnnnnnnnnnnnnnnnnnnnnnnnnnnnnnnnnnnnnnnnnnnnnnnnnnnnnnnnnnnnnnnnnnnnnnnnnnnnnnnnnnnnnnnnnnnnnnnnnnnnnnnnnnnnnnnnnnnnnnnnnnnnnnnnnnnnnnnnnnnnnnnnnnnnnnnnnnnnnnnnnnnnnnnnnnnnnnnnnnnnnnnnnnnnnnnnnnnnnnnnnnnnnnnnnnnnnnnnnnnnnnnnnnnnnnnnnnnnnnnnnnnnnnnnnnnnnnnnnnnnnnnnnnnnnnnnnnnnnnnnnnnnnnnnnnnnnnnnnnnnnnnnnnnnnnnnnnnnnnnnnnnnnnnnnnnnnnnnnnnnnnnnnnnnnnnnnnnnnnnnnnnnnnnnnnnnnnnnnnnnnnnnnnnnnnnnnnnnnnnnnnnnnnnnnnnnnnnnnnnnnnnnnnnnnnnnnnnnnnnnnnnnnnnnnnnnnnnnnnnnnnnnnnnnnnnnnnnnnnnnnnnnnnnnnnnnnnnnnnnnnnnnnnnnnnnnnnnnnnnnnnnnnnnnnnnnnnnnnnnnnnnnnnnnnnnnnnnnnnnnnnnnnnnnnnnnnnnnnnnnnnnnnnnnnnnnnnnnnnnnnnnnnnnnnnnnnnnnnnnnnnnnnnnnnnnnnnnnnnnnnnnnnnnnnnnnnnnnnnnnnnnnnnnnnnnnnnnnnnnnnnnnnnnnnnnnnnnnnnnnnnnnnnnnnnnnnnnnnnnnnnnnnnnnnnnnnnnnnnnnnnnnnnnnnnnnnnnnnnnnnnnnnnnnnnnnnnnnnnnnnnnnnnnnnnnnnnnnnnnnnnnnnnnnnnnnnnnnnnnnnnnnnnnnnnnnnnnnnnnnnnnnnnnnnnnnnnnnnnnnnnnnnnnnnnnnnnnnnnnnnnnnnnnnnnnnnnnnnnnnnnnnnnnnnnnnnnnnnnnnnnnnnnnnnnnnnnnnnnnnnnnnnnnnnnnnnnnnnnnnnnnnnnnnnnnnnnnnnnnnnnnnnnnnnnnnnnnnnnnnnnnnnnnnnnnnnnnnnnnnnnnnnnnnnnnnnnnnnnnnnnnnnnnnnnnnnnnnnnnnnnnnnnnnnnnnnttgtatccacagctgcccccaggtatccagagttgcgccatgtatccacagctgccccattgtatccacagatgcccccatggtatccacagctgccccatggtatccacagctgcccccatggtatccacagctgccccattgtatccacagctgccccagggtatccacagctgccccggcgatacccacagctgcccccatggtatccacagctgcccccgtgatacccacagctgcccccatggtatccacagctgcccccatggtagagccttttggagaggaggagaaaattcagctttaacttcaaccatgtctccatgaggctggctataggtatggtgtggtaccggtaccaggccaatgtccaaaaaggtatgtagaagaggaggaggaggaagagaggaggaagaaaaggaggaggaggaggagaaataattatggatggaaggaaggaaggaaggaaggaaggaaggaaggaaggaaggaaggaagggcatgtatagaaggtgccagactatccagaataggacttcagactcaagttctgtctccatgtcacttcacctgatacctataccattattattttaatattttttatttgattgattggctggttgggtgggttttttgtcttgctttgagacaagacctcatgtatcccaggccagcctcaagctcactacgtagtcaaggatgacctagaattcctaagtctcctgcctctagcctcctcatagcaaggttgcctgatttatcaagttctggggattcaacttagggttttgtagatgctaggcaaacactctcccaactgagctacatccttggctttgtgtgtgtatgtacatgtatgtgtctgtgtgtatgtgtgcatgtgtatttacatgtgtgcatgtgtatgtatgtgtctgtgtgtgtgtatgttgtgtgcacatgtatgtgtgatgcatgtgcatctgtgtgtgcatgtgtgtatgtgtgtacatgagtatgtctgtgtgtgtatgtgtgtgattgtatgtctgtgtgtctgtctgtatgtatgtccatgcatatgcagaagccagaggttgatgtggtcatctttcccaatcactccataactaacttttaatgacaggatctttcactgaacttggaacacactggtttggctggagtgaccagccgtccccagggactctcctatttccatattcccacgtctggaattattagcatgcatcctgctcctagctttttacataggctctgtggaaatggtctctagacctcagatgcgcatggcaagcactttatcaactgagccatctcccctcaacgccactcttccccattatgtctagtatataaaacaagttttcttataacatttgtatcccacccgtgtatacagtgaactttgattgtattcaccctctatggatcttacgtttatcccacccccaccccccaacatcccagtagtcaccattttagtttcatgtcctttgttttttcctttgtctagtgtccacatatgagagaagatactaatgcttgtgtttgtggggtgacatatttcacttgccaggcccatctatgttcctgaagttgtcataattgcttccttccttatggctgaatgaggctccactgcatgcataccaccacacttcatccatccctatcgtctgtcctcactacttctggccagagaagtcagtcagctctccatagcagtatctgtgtatctcatttatcacagccctatttgaggtattacttaaggccgagcctcacttttaaacacagaactagagaagtggctttagatctctgagcaggatcatcttcactttctctttgggtgacttacatgaatgtcacttatgtttccctcaagtaggttgatttacctaagtaaagagtctacagaatgccaccctgccttcttcccctagtcttctaagcaccagatgccaatagctagagcggggagtggactaaactctgctctgcccgataaccttcttccttttcccttcctttttctttgatgcattcctcaactttcatatgcttattctcgccttgaattcttgtcctggaaataattgccaacatatatgcccattcttgccaaaacaaggcaagctcagagctctgtatgtcttcctaagcagtgcgtgtgggtggcagcactttgcaatggccatagtctcctttgtcccacattcttgggttatatccaaagtcacaaaagagtagcatacagaagagatatctctgtccatcccctccccctgaaaacaaaaacatagcgagatcattaaccagcagtgcaacacccctctggtattctgtggcaaggcctgtgcggtgtccctgacatcattctttatatacaggatgctcctgctcccaatgaggagcacagctacttctcactcatctcccattcctctatcagcatctctagttaaacctgtacagcagcagttctcagcccgtgggtcatgacccgcctgcgggttacacatcagatatactgcatcaggtcagatatttacatcatgattcgcaacagtagcagaattacagctatggagtagcaactaaataatcttgtagttgggggtcactataacacaaggaactgtattaaagggtcaaagcgtttaggaagattgagatccgctgctgcagaggaaaaggttgaccttgttcctaagcttgacatggagagaacctgtctttactcggagacacgtttccagagattcaaacttccctttctcagcgtcccaaggacctaaggtataatgcgagcgtaatgtcatatatgagacttggttttctttcctccgctgtctatttgcaaaatgccttccacctcatcctggggcattcgtctatgagcacagaagcttatccaaaggtcgatacgaaaatgctagcacggtaacaaatggccttgactccccttccatccatcatggtgtcttgcccataaaatcttggcaagccaagaagtggctgtttcttttcccagtagaggaatttcagctccaagaaatagtttatccttccttttctgggaaggacagccttgctctctgtacatcttactgtgttggaaccttgagacaaatgtctgggcggagaaacacagggctattcccaggccccaggttctgaacaggaagatacccctcttctgggaggaagttccgttacaattgttcttcttaaaaaaaaaaaaaaagcacccctcccctcccaaaaaaaaaaaaaaaacctttaaatcaaggagccttataaaaatcacctttttgttctatttcttgatgttttctctggagctagaaaaaaagcactaatcttgtcagaagaggctgcttccttcctccctccctccctccctcnnnnnnnnnnnnnnnnnnnnnnnnnnnnnnnnnnnnnnnnnnnnnnnnnnnnnnnnnnnnnnnnnnnnnnnnnnnnnnnnnnnnnnnnnnnnnnnnnnnntgtacagccagttgcactctgtgaaattctgtcaaacttgctctcctcacattcagaggcttggtgtgggcttttatggacttttgctcccagtgtccccagcagggtcacaggcattatttcaggagcaggtggctctcattctaaatttgctcaaggccccacagcttcctcagtggacagcctgcaccatggttggcatgtttatttcacaacattcaggtgcaggaaatggcacatctctctagttaattcaatcttaattgatatttgagcctgccacctgggctactgtaataggtttgatttcagttatgttcaggagctccttctctggtgtcatacaaaaaagaagaagaagaagaagaagaagaagaagaagaagaagaagaagaagaagaagaagaagaagaagaagaagaagaagaagaagaagaagaagaagaagaagaagaagaagaagaagaagaagcagaagaagaagaagaagaagaagcctccaaagacttaaatggcctccaataaacatgacaggagcctttaggcctccactcatgatatcatcacagagtctaccattgtctagggtcatgcagtccatttgaaggtaaccatggcgctgttggctccatttattctgttcctgttataagcggacctggaagtgcttctcccagctctgaagtccaagcaacttttcaacatccaattgccaactctattaatcacgtctctcactgcaacacaatagctgacaaaatcaactattctggctcccaactcaagggtccagtccatcacgacagggtagtcatggaaacagaagtatgaggcagctggttccaactgcatccagtcaggaggcaaacagtgactatttcttgggttcctcttacttttcccttttacttcagtccagggccccaccccatagactagcaccgctctctgaaggccatgagttagcagccaccatgggtcacaatttcacttgtaaaacaggtcagattcttatactcacagagaaacaaggatgaccttttcaaaagtgctctctcgtgagacatctcctcgtctataaaaccgagccacctctgaggcaaggtactatgatcatcaacaagagtgacagcgaagccacgcgcagatgtgtcgcgctctgtctcaggattgttgcatttcccccctgcagactctcagcaatgcctctgattcctccttgaggacagaaaggacatctggatttgctttctgccttgttctggttgttcctgatccagcgtcacgtagaaaaggaaatttttgtttatatgggaattttttgtttcattttccagtgggagagctgagctccttgcctcctcctgatcatcatcatcatcctcactgacacaagacattgcatgcaatctcttacatcccataccccattcccaaaaactctcttggacaggacactaacgtgttcatatgtgtctttttatgtgcatctagtctcatgaagtatgtgttgtttcagaaaaataggcatttccatggctagatgtgattattttgcgttccattttctccttttgtactaagactgcgtgttaaggcccttcctggtgctctgcatgagtctaacccattgatcttgatgacctaccacatcctgtcctttccccaggcctcttctggtgatggagccccaggctcattcatgccagtatttgcatgttaggcaaccatggaaaagtcctctatgcgtcaatctgaaaactgattcacacaaaacttttaactctacctgtttttttaatgtaaaggaaacacttaataatgaatatataaaatttgatttttttttaaattacaccagtagttaagataaaactcactttcaatcttatgacccagagaaaagcctaaggaatagtttagtatctataagtgcattcctttgcaaaatgaaaatacttcccccattcttttacttcctcttcttcttcttcttcttcttcttcttcttcttcttcttcttcttcttcttcttctaataaaaaggccggtttctctgtatagaatattttgtagcttgattctttatcttcataaaaccttgctaagaagactgggaagatgtcaccatggttaaatagcctcactcctcttgtagaggaccaaggtccagttcccagaatccacatggcagtttactgctatctataactctagttctagggtgtctgaggcccttacatgtaatttacccactttacttctcatactttaaggaaggtcaccatcgttctttgtttccgcctgggattgctttagaatctattactgcaagcggagtttcctgttccaagttatgtgagttacttctctattgctgtaataaaatatcacaaacaaagcaacttactaaaaagttagttttaattggcttatagttgcagagggtcaaagttcataatggtggaacaaaggcatgggggagcagatgaagagctgtgtgctcacagcccgcaccacaaccaggaggcagagagcacactgggaatgacacaagtcacaaatcctgccccaccccccttcagtggtaaacctcctccaacaaggccacacctcctcacccttcccaaacagtctcgccagccagggaccaaggattcaagtgtgtgtgtctacgggggccattctcattcaaatcaccacacaaatgatgtgcagtttgtaagcattccagaaagctgtcaacctaggaagtagaaagaactgggttcttttctttccaagctgatatggccagtggcataggggaggtactgctggttaccttggatactgtttcctacttccccagaagtagaagggaagtgcatgctgctttcttccttggatccaggacactcgatccattcatctgattcccctgtgctatacagccaacgggctctgaacacataagttatttaaaagaaccatttgacaaaatggagcctctggtcgtatgaggtcatctagaaagtcagagcaaagacaggatcttggtgacctggggtcacacagccctccctccctaggtatgtgcggtcaccggggtccctgaggacaggggcaagggcccagtgggagtgcagagcagtctgcagaatagaggtgaaaggtggtcttagtaggcagagggcagtgaggagagggcagggagaggctgttctctcatcaacagcagcggacatccatcgagaactaggaagtgagcgcaagagacatcctcaggcatggctcaagcatcttacaagtttgacgtcttaggcaatgaaaatgcttgacatagccaaaaaggtgccaggagctgaaccaggacccggatcacctttaagcccctgtctctttgattaggagctctgttcccatcaacactattttatgggaacaagcactcaggcttagagcaactgggcagctcccagagtcctggagctaggaaatagatcgtaaaatcagtatctaaaccccagcccttgccagctccacattctattccctagacaagcaatggctaggaaagaattaaagcgaggcaaccttaacaggaacaaaatcatccttgctgcatgagaggcagggcaggtgctaaataatttaaaaataagcctggaaaacataattacctaaaaggaaatatttgtccagatacatgctggaaagaaatcccgaggacttctggaaggaggcaacaaaagatcaccaaactctgaaagttctgagaaggcaaaaacaaggtcaccggcccgtgcattgagggctcagagtcccacagtgaccctcacctttcctcactttttctaggatctgtgatggcctgaacaaggaggaaaagcaggaaaccagcatgatccttgaagacagcgtcttggatccctcgctccgagagcgcctctccatcatctcccggaccttcgagaaccagaggaaactggtccaaggagacagcatgctctttctggaccacgttttcacgatcgagcccccggtgagcgcctgaataacatccagctatctagtgaacacagtgagggtgcggggctgcaggcgtgcggggctgcgggcgtgcggggctgggagcatgcagggctggaggcttgcagggctgggggtgtgcagggctggggtgtgcagggctggggtgtgcagagctgggggtgcatagggctggggtcgtgcagggctgggaaggtacagggctgggggtgcgcagggctgaggggggtgtggggctacggggtgcagggggctgcagggctggggatgcacagggccgagggggtgcagggctgggggatatggggctgtagggtatagggctggggtgcgcagggctgagggggagcggggctagggggtgcacagggctgggtggcaggacttggggtacagagcttagagtacagggcttgggggccagggctgggggaacggtaggactgggctacagagctacttcagctagattctccactctgggactggcatatcaagtcctgaggccaatgattggcataagacactgcatgaaggctgatgggaagaatgccagtaggtcacactttctgtgccaccgttcccgcttcctcagagttgcacaggatgtgtggtttgtgtatatcatctcacaacaaccctgaaagatagagtgaaaaccccaatatgcaaataaagaaatgactcccctcgcttgcttaaggccaaacagctggtgtccacagttgtagatttagccctgatcagtctgactatggagcaggacttgtcaatcttagcaacattgctcttgcagatgtgtaattcttcatccaatgcatttatgtgacgatgtttgcccctgtgatcaccaagactgtcttcagacacttctagatgttcccatgtaggcaaaaatcacccaggacttaaaatgactttgtcctcgatacactcagcataaatagttgccgattgtatggtctgtaccaggcgctatgtgcaccaggtgcccaggaacagagcagatccagtccttgactttacagcctattcagtgctgtccacagtggactgattctacagaccaaacgcagctctgctctattgcctcggtgtggaaggagtggacccggagagatggttgaggggttaagagcacatgcaggtttcacaaaggactcaagtttgttcccaactacctatgaccgtagtcccagaggattctattccctcatctggcttcataggcacctgtatgcatgtggtatgcattcatacatgatggtaatacatacataccatagataaaaataataagtcttttttgagaagtttctagcagctttgtgtgtgtgtgtgtgtgtgtgtgtgtgtgtgtgtgcgcatgcgtgcgtgcatagccctatagatgtcagacattattagatgtcttctctattgctctccactttatcccgttaaggcaggattgctaaccatacctgaggctcagggttccagctagaacatctggctagggagctgcgggggagccaccagtctctgctccctagtgctggggttacaggcacacatggtcaggcccagctttcttatacaggcgctagggatttgaactcagattttcatgaatagcatacacacttgccaagtgatccatccccaccccacccccagccctgctaacagcttttctatttgctgtgtgctgtgtattaagctacccgcttcctgctcaatacatcccacttaacaggcatagaatggtttcaggacagcaactacaaaaggaatagagacagtccaaagctcagtctaattggttcactgttgctatttaagccaggtggagaaaagacttgtaggaaatgtcgctgtctgagcagttcattgtccttccttccatctgtgcttccatggctgaataggtttgagaaacaataggctccatatatgctatgaatctccaagaaagcgctttttccttggaggctcctctgggtggtgttttgtgtgacccaccatgggagtcactgggaaccacaggaatggtaccctgggtgagaggtaagacatcaccacagtccacaagttaaagagagcctcttggcagaagtcttgagcgagtcttgggctctaagaacaaaatggtgagtgtacatggagtgtttcatccaggatggttagagccagccactttgctggcggtaaaaagccaggagagaaatagagctggagatacaggtcgaggctgaaccttctgtcacgctggaaacttctccaaggcacagaacaacaaagggctctccagacattttgagggtgaggccagcaagaggttaggtcaggatgagaaacaaaactaaaagcaggtaaagtctggagacatggaaagggccagggatgggtgactggggcaggcaagcgagtgactgtgctgaatgagaagagccagcagcctgtggaggcaatttcaggcttaccaaggtcctcaggacttcagtgttcttcctggccagcagcggagagccagcatggcagcttctctgctctactcttgcgagtatgtgagagcagatggcagcaggattggaaatgtgtggttgacagaagatgggtgcagaccacggaaaagtcctgtccatacctaggtcggaagtaggagtgccagaatgacctctgactttctcctgggcttcctttcctaagccagagatgggggtgtgttaaggcgtggtctttgatgtactttcgaatcgtggcgaggcactgagttggcattcccatcccggggcatcttcttgccattgggaagaaacccattttctttaagtggtaacgcacagaagtggtactcttcaagtcaataagccagtttgtttatattatgtagaaaataataccataatgaaactctggaaaatccatgtaccgtgtaagtggactttgtagaatctatgatgcggtttgcccttgccatacagtgtttgggttttcttctctttacagttttcattggtaagctcttgacagtttctttaacaaatgtgtatgaaggcatggaaccccgccagtgtcttcctgcagtaactctgaccagtcggcagctctcagggtcaaacatggtattgctttactaccatgtaaagttacagttagtaacagttactaacacatattagctgtctgtactgatggatttcactatggtgtgacgtcacacccatcatacttcagtcacatctgctcccctaactcctctctcaccttcactaatagtcattcctaccatgttcagggcacctttggggttgtcctgctttgcacatgtgaaagaacacacatggttacttgtctttctcacgtatgtcacttaacgtggtgacccctagtcctgtccattttgaaataaatgattttactgtcccttatggatgaataattctctactgtgtgtatataccatattttctctatgtgttcatctgcagatgggtacctaggctgatttcataccttgggtattatgactagtgtttaatagacatggatatgcaagtttcttttgtgtgtgttgacttcatttcctttgggtaatggtacacatggatgtatgataattctctttatatttttaagtatggcccatatccttgtctgtcgatagtggttatattaatatattcttgaggaaagttatttattgatcttaaatctcctgcttgatgatctgatcattctgtatatcatctatgttgtatgtactgcttgtaacgtacgtaatctttaaattacttttgaagcgattttctgagaaaatcctgccagttctccagcttcatggcacatgggtctcttcctgtagagagcctggctttccgaggctggtaaatgagctacggtaatctcagctgagagcgttggaaaggattcacaggtgaagggactggaactggacattggagaaagcctaaggtttaattaagtgggaagggaggagagtgttcccagctagagaagtcatggaagctgggggtagagggagcattctgttcacagtgggctgaataatggtgagctggactgggtttctgcctggggaggtaagcagaggtcaggtagcctatcatgtacagcctacagctccttgtcactcaccgtggttttctggagacactggacctgagagatggcaatgtgcattctttgcaaaagcagttttggaatcaaacacattttgggggaaactatgtggaaagagaaggtacttgtccaaatggcagagttcaaacagctcgtgcccatgactggctccctcccaccaaacacctgctgggactgacattctgaaggtcccagcttagcccgtgctgatgaggatctgagatacattgcaggagagcagtgtactcaaagggagttggaaagtgtaccctgataacaatgtgtggcttgtattggaggagggtgggtagcaggagaggtgggtggtctggggcagagtaaacaggtcagcaggtacgattagggtgatttcatgagggcaatagtgacccggaacagtccagtggcagatacaaggcatggttaaaaggaaggcgcaacatgctttttgattgatcattgcgattgaaatacctcaagggtactcactgaagtacctggcccaatgctaatagatggatggatgggtggatagatggatggatggacagacggatggcattcagaaaatactaatgagtttggctctgaacatgtcaaatttgagattactacagatgtctagggagattcagaaatgtagaactaaaattggtactgaaatggattcaaagaattcaggatgagacaaaagatttgtgaggatgctgtagaggacttgatcaaagacgctggaacctcagagagggaggaagaagagaagacccactgagagctttccctatacccagggcatctgcactgctgtctactgaacttctctgaatactgctcacctttcgggtctcctacatcaaacggctgctagttgttctctgaaggcttagctacacgttggaggttagctttgtcctatgatttgatctcagttaagcagcttcctgctcagagctgatgctgcagcagaagcagaaaagatttagagcaagcagtgttgtcaactgaactaataaccaatctcagccacattctatccaaataaccaaaataaactgccatcagcagaggtccaggcaccaccttcccttccgatgggctggctgctccgcctctggccatggaggaaggaaagcacttcaagtgaggtaaacataaaggaaagacaaaaaaaaaaaagcagcaaacaagctacaaaattttaaaaactctaataccatagggtctgaatagaagtaagaaacatcagtttattttatcaggtctacatctgtatagcttcattcttcaagcaaatcagctaatactgaagttttgctcagtcctgcatgtgggctgtatgccctgcatactgagtactttatgagaacattgttccagtttcagaggctcttcccacttaaagcaaagagattcaagatcaggaaatcaatcctctccctaaattgcccaaaggtgatgatggatttgaatttaaatctcattttattgatattatcctatgaggagctgtttggctcaatcctggaggaatgaaaggccccaaactctacagtagcaagctcttactgttccaacacccactctccatttggccctttggtggttttatgagaaagcccccagaggctcacgtttggatacttggtccatggttggtgaaactattcgggaagaattaggaagtgtgatcttattggaggaggtgtgccattgtaggtaggctttgaggttttcaaagactcttgtcattcccagttagctgtctgcctcctgctgatgcttcaaaatgtgagctttcggctgtcccatctgccatagctttgcttgcctgtcatggacactagtcctctgtcactagccaaatcaaatgctttctttcacaagttgctttagtcatagagctctgccacagcaatagaaaagcaactaagacaggccgcatgtcttagcaagcatccttctttatgaaacatggccataaccatggtcatcgggtctgcagcttgtgagctttcaggagttagatttaggtatcttaagtccaaaagggagcattgaggacccagaatgaccaggagacagaagaccaaaaggaactttgtaaaaatggtagttaattatctattgacatttctaaggcaattaggattactgtggactcattagagtatctgagacataactattgacttcaagtttcccatatatcaattatttgataatatcttggcataagataccttgataatatcttaatgtcattagcttggctttctccatttattgcttaccagggaaggcatagagacaagtagactacagataatgtgtcaagctgcctgcttccatttgagatctttccccatctccagaaggaacctgccaaactgagtctattatgcatgggttttttggttttgtttttgttttttggtgtgtttggtttgttgttgggttttttgttgttgttgtttttggtttttgtttttttgttttgttttgttttttgccttccagaaagcaaatggaactgtttcataaatacaatattcacttgtgccaggtagaccatgtctgggctgaactttgatgttctcatcctgttgttccctctgcttgagtctcctgggtccccctgaaagagagaaatacaggaagacaaaaaactcagctctgaaaatttcgaggtgcgagaatatcacaaggcaaaaggagagaactaaggttttgcttcccatgggcgtctagtgaatctcgaagacctcagggcagacgtaagcatcccatctcggaactgtagggaggctggctcaggtcacgctttgaagacaaaacaattttctgaacatggaacacttggaattctctccaaaagaaaggtctgaatatttaaagatatttttccaactagctgctaaagtatttgagccgacccagcgtttctgctcctccaaccccacccacacctccctcagagtagacctaacctagcagccctaggcttcatctaaccgagctatcaaaaggatggctcatttcttcattaccacacaagtaatagtaaccctcgctccgatgttacttaagcctctgagaaacttgctgccctagcaattcggacatggagagcacagctcaaattcagtttactggatccttttcctcgtttggtgtagagggtgagctcagcagaagcagggtgggtgcgagtccagatggctagcaagaagatgcagcgctttttgtcctgcgcagcccttcctctgctccagtcattagctgtgactcacaaggcgaacacgtgggcgctgactccttggaaatagacaccaggaaggagcccaaggacgtggatctgctgagatgggactgcccttgacaagctctgcccgatcggtcggccatccttcagccttgctcattaggattctcctttccggtctttgtgctaaggcccacgtttggccattgcaccagaacattcactattgtgttgaggaaccagtgtgggtggaaagaagcccaggggagccttagaagcagcaaggctgcccattaaattggccaacacctttccttcctgggagggaaaaagagagacatcacacatggccacctccaccagctaagaaccccatggagtttggtatatttgggttgaagataaaatcaagacagaaagtacctattgtgaagcttcctctgtcaaatggatagaacacagggctccctcttagcagcttttagggacattattttgagcatcacaactttccttgactatcagtgtcccagctgatggaactgagcaatctttgcaggctctgtgtcactttggtcttttctctcaacagtaataaggatagtttacttgtcaatgtttttagagttccttttttttttttttttttttattgttgctgtttgagaccgttggtatttgtaccaagcgtcatagcttttgctagtggttggatctgttgtaagtaatggaaaagatgacagcgtctcattggtagattggtcagtggtggggatttggcactgaggtttggagagatggccccgtgcctaggtgagcttgtttctcttgcagaggacagcagagttcagttcccagccccataaccagcagcttacgaagtgctgcaactctggcctccatgggaatatgatgccctcttgtgacctgtgtggacatctgcatgcatgtgtgcatacatacatacatacatacaggcatgcacacacacaaaatttgaaatgaatctttaaaaaaaacatttaaaacagacatttgattttgagagaatgctttctttctaagaaaatttctttctgcttctttattttgggaaatggaatctgcagagcgtttcttaaactcaggggctcgggtgtctttctccctcagcttctcgggttccaggactggagcagcccttcctgttgcgtaaggtaaatggtggggtggttgaaggtgtttatgctgccgagcgtgaagaagtcacttcgtgtctgagctccacatcaggttactgtttccatatcttatctcaagggactgggcttcgaccctctctcaacccggggagcttgacaaggactcaccaaagacatcgctcaggagcgttaacacactcttgtgggctttgatctctaaaggaacctgctttgagtcaccttccagaagaacccaagcctatgtggagagtgacacactgttcacagcggggattgccagggcagactgtgtcagataagtctgagtagttatcgctatcgctggtagtgattctaaacgtcctctctctatggcatagtgagagaggtgggccctaacctacttttagaattgcagagggcttaaggaagttaggagaaatactatatactcctagccttggtgcccctacccagcatctccctccctcctttcctccctccctccttccctctctccctctctttctctctccctcccccttcccctccccgtctctccttctccctctctctccctcttcccctccccctctttcaccctctctctccctctccccctccctctctctctctcacaccctctctccctttctgagaccaggcttctctgtgaactcctggctgtcctgaaactttctatgtagaccaggttagccttaaactcacagagatccacctgcctctgtctcctgagtgctgggattaaaggcgtgcgccaccaccacttgactcaagttttctgtttttaaactggcaacaaaaggacctcacaaaggggaagactgagcaaggtgaggggcaggaactgtgaacacaggtggtgagaacttgagctctcaggaaacacttgcaaacttgtgactctgagttagacaccttgccttttttttttttttttttttttttttggcaagttaaagattgactgggaagctgagtgcgtgagtcacccttatacatgcaaccagagaatcaaaatgcaatacttttatttgacacacataggaattcacactgtagacaccgagtcttcccaccttccagatcagtcaagaatgttaaatacacatgtaactctgctcttgcatgttaaaggcccacttagcaaggtttctgggaaatgatcttattggcactaattacttttatgtgtgtgccggacattgagcataaaagaactatagcagcttcagatgacatctgtcggttaattgaggctgaaagacacatcctaactgtgggctgcacctctccacagccagactgaataaaagtgagaaaacaaactagacagcagccatctttctctgctccctgaccatggacacaatgcgaccagccaccccaagcccctgatgtccctgccgtgatggattgtaccttcaaactgtgagccaaaagaaacccttcctttaaaaaaaagccagtcacctttaaggacacccctctccctgtgtttatcacctgtcacggaccagcagccgcacgctcaaagcatccagagaggctcaacaccagccacagtgttgcttggttcactgttcttatacagaaggaactagaaagctccaagagtagtaatataacattgagccaattagcatatagcaatagacttaacgattcaaagccagttcctttaactagtaggtcccttgactggtaagtgaaatagggttgttctactcaccttagagccgggaaagacagagcatcagagaaaaggggggatggttgtagtagaactgagggcaactgaaattattattatcattattattattactacaccagagtaatcatactctaatagtactagaactcggatgaggagtggggagaatggttagagaagggaaagagagagtctttgagatagaaggaaaacggagcagctgagatccgagtgaggaggcaagtccaggagttcataaagacgggatatagagacaggatattgacgctggagccagtggggaaattcctgaatattttgatttttctgaaatgtcagatctgagcaataaaaagaggcaaggtatttccaggagcacaagcaagctgggagttaatttcatctgggttggtaagatgtaaggtgggaagattggaaggcagagagtaccatgcagccgtcttagacatattgcctgtttataaggtttgttctttgatctgctaggaaatgcatagctttggggggtttttgtttggttgggttttttttttccaacattttgctagaaagaaatagaagtttacttttcggtaacacccagctgaaaggaaataatgacaccacaccaccacatccctctgagagaggaaacaggatgatcatactttggctttgacctctgcacagtcctgttagttcgccgacacacaccctgacccaggagaggacttttgggtagcatctgtccttggattatctcccgtgttcccaaaaagattcaagttaccaatggatgctgtggactcagcagggcagtggctgttctgcaccagagcaccccagctctgatccccattcagtctgagccctgtaggctgtcttcttacattagcctcctgtcaccagataaccctctcaccgtggtgccagtatccctttgttggttagggccagtctacccccttcccaaccctcatttccacatagcagacgtatttacccatggcaagttcatcaagagtgcttagaggcttaaaccatgctgtccctttgtctgtgtatacaccctggactctggggtatgggggccatgaaaatggtcttgcttaccccaaacaataagacttttttttttcacgtgttctgtgatcatctgatttgcaggccatcctttggagaccacttacttctcaagactcactgacattttttctagcatggattctctcaggatctagaacatcctttggtgctttggccagtctgtgttggaacaggttagctacttctactcaaagtctggtcagagcagggtctaaaccctctggcagattcacgcttatcacatggattaaaatgaaacccaaatcctcagtcattcttaggaaggatacccattggcatgtcttcccttagatgaagactcagctgaatggctgagccatatctgcttagcttgtctccttttctaggtctgaacactccatcattgcccttaaactctacccaagggccaggtatttgccatttatcagaaggggacaaatatttattttaagctcttgcaaagaaaattttgcagtgaaatgaccaagcctgtaagggtgctttgaattcctttgtcccctctgggatctcaggggcctctctgggcactatggttgtatggttttgagggccatccctgatgcaatgaaaagggcagaaagcttcagatgtgaatccatgtctgataataactacctggggtgcaaacagacagctgactccgtgatcagcaagcacctaccaagagccacctctgcttgggtgctggagacagaggggtgagtgcttgcctctcttctcttgaacttagctggggattcaaaaccacttcatgaccttggcagccttgctgttgcttcttggagccttggtgtcctcccctcactctgaagtcaggagggacactgcctgagaaggtcacagatcagggtgattgctctcgtgagtaggtcaaaagtgggtctagtttcctgttccccactctttgcctgatgttgccttttctcccagtggtggggttgaatggaggaccttacctctgtgaggcgatgatgtcagccatctgtgctcttctccattctttccaggagtatttttccttccagccagactggatctgctatgctttggggactgtctgaaaccagagcctgattatttattaagttgtcttgcttcagctttctattgagctgtgtatagatttctcaatgtgtttagtacttctgctcgtttggccctatttacaaaaacctcagaaaagggcacatattttctccccactgtcttttcaacctttcagcttatccttctaagaagtaacatggatggtggtcaacaaacatctagggaactcttactgaatgcgtattgtttccagaccttggggggctcttgaaatcttgtgcaattgacacctctagcagcctgagaagttagtgaagaaataccagattaatatggtcaatacaatattttaaatcaattttccccagtaggcaaattctgttagatggtttattccaacatagtagcaaaacttgggtttcttactatggttatcagggggaggagtttgtgagttaaatgacaggaacactctgagctgggcactacgctcccttgggccattgctatggctccatagagcagaggcatttctagttactgtcattcaaaagttaggaaggtagtgcctctgcatagggagccgggcactcctctctccgccgtccctgtgaaccacatataccctgctaatggctaagctccctgccatcttggcccaccctgtttcctctgacatcccagggctgggcatgcatggggcagacagcagatgctcattgaatacatatatcttaaaaatgcttggttttacaaagcatggtaacacactcctgcaatctcagagaagtagacagaggattgtgagtttgaggctagccttggctacatagtaaaactccattttaaaggaaaaaaaaaacttatcttcccctattttcttctttaatgtatttcatagtcataaactcaatgatatcttttaaacttgttcaaactttgtgccacttcataagttaccaagccgtgtaagtcacatctgctaggtaagacagtgttttctcatgggcagcaagagtttccttcaggttcccaggatttcagcctttatgtgtggtttagtgagaatgtgaattggttcggccaccatagaaaacagtataaaggttcccaaagaaattaaaatagagctaccatgtcacccagagtctctcttcttgctgcataccccgagaaatggaactccgtatggcacagtgtcagttccgtgttctctgcagcacgattgaaatagccaaccctcgggacgacttaaatgtccatgggcaggttatgtaggacctgcgtcgtcattggcacaggacccccaagaccaagttctcagtacaaaggagattcattttttcccagaggaacaaaaggcagggaataagagacaatgacaggaggcagaggacaaggaagaaggggaagggaacaaaggagggagggggaaagagggagaagggaagaagagggagggggaagaaggaaggagggaggagagaggggaaggatggaggagggatatttgccctggagggtcatatttcctcctctggatagaatatttctttgtggtccagacgcaaatgatcgtttatatagggataatatgaaacctggggtaagatcacttgcttagtttgattacgcatgttatttaatgttgccaaaaatgggacttttgtctgctggaatatagctttaggactatagcctatggtttacaagggagagaggtaattgtggaagggaaaagcctgccaccatgtgttcccatgctcatgccttctagagcccttctcaggcaaataaagaaatgtgacatagacatacaatggaatattgttcagccttaaaagggacaccttaaaagatgctcagtgggtaaaggctgccaagcccggcatccagagtctaattcttggaatccacatggtggaaggagagaactgactccagactttcttctgatcttcatagccacattgtagcatgcacaaatctgcaagggtgtgtgtgcacacaataaataaatgcaaaaccctctaatgtttgtgtgtgggggggggggtgtcccccggcattttaacaacattgatcggctgaatcaggctagacccagtaccagagctcatgttctcaggcatatgtaggctataaaaaagagagctgatacaaacacgaggagaaaggcaggtgccagggctcagagggtgattatgggccaatgggaagatgctggtcaaacagccatgagtcctggagagccagagcacagctcagcacctgcagctgataacacacaaggatagacccaagatgctcccgtggcacaacaaagaactggttaggaaatgcaggtgctaacctacttgcccacagggaccatttcactatctatacatgtgtcaaaacttcccataccccttaaacatacggggaagaagtcatggaattatcatttgaaagcaatgcctttctttctcgttcctgtttcaggaaggtgatgtctggcccaactcatccgctgaaatcactgtgtactttaacccgctagaggccaagctctaccagcagacagtttactgtgacatttcaggtatggacttgttctgtgtggttaccaggttaccaagtgctcagaccgtgtgtgtgtgtgtgtgtgtgtgtgtgtacatgtgtgcatatgtatgtgtacatgtgtgagtgtgtgtgtatataagaatgtgggagagcatatattcaagccatttggtactacatgataccaatagaaggatctatgtccaaagaggcatctctgaacccacttcattaaagtctgccccttggcaaagcttcaaagctatatccaatctgggtaaaacataatggagcaaagtgagagtgaggaaggatctcatgtgatctcaaaatgtgtccatcaaaataccagttataagcagaggaaactcggctttacagtgaggagcacagaagatggcatcttaggaccactccaataggatgcaactaggacacagcatcctgtcaacaacatcaggaccagtctaccacatcctgcggtctgacccagagaatgcttcaggcaaaccaactgaagcacaaatttcgaggtccagcctggattgtcacaaacttcagtgtcatgaaagtcaaggaaggatgggcaagctgtccaagagagactcgcgagagcagtgacgtgatctagactgaccgtgttgctgcaaagagcacccacagggaagaggcaaggaagttctttatccttctagggaaatttgtccattttccttatccacccattgagttggtcattgtctggtaagacagtctctcacttcatgccctgggcaaacctgaaactcactgtgtaatccagacagatctcaaactctcagagctcctaactccgcctccctgatgctgggattacagatgtgagccaccacatccaacttctgtctttttaaaccctcccaattcttttaaaaggcccataagaaaaataggtagatagcaaaattataaagccaaaaggtagcctttctctcctggaattctatcgagaagcgtgttcggcagtttcttgggaatcctggctaactctgtattactgtttgttgatttactaacgtcacatgattctctttggtccttgatatgagagaaatacatttaatttacctttatcttctctttccttcttctttcctttaaggagttataatttacagacagtaaaattcaccctggttctgtgtgttttgacaagcctgagtagtggtatcacccctacccgaatcaagatagagaaaatccacatcaccttgcaaagtccctttatgccctcctttgctggtagcactaagcccccatctcgctctcacaagctggtcattcttactgtatttattttgtgagtttcacttatagctttaaattgtatattaaaccctaatggttttgttccctggaccgtataatgtctcttggcatgtaaggatactggtatacctaaccttctcatcaatgttctgccaccctacccttctgccttctgtgggttttcccaggtctttaataagctcattactaataaccatagttaaacctactatttacatagatgttgtcactccaagaagatatgtccccaaggcctatgccaaggagtctcgtccttaataaccatcaatagctatgctggctacctctgctgtttcatctgtaggttgcacagggtagcatggatgctctgattaattaaaatgggaggatgaatgatgatgccacccaagtctcatcaactgcccaaaccccaccgttctcccacacccatgaagccacacctctcagtcagccttgggctgcgaactggagaccgtgctagcctccccttcaacacacctatcattgtccatgtcatgggaatggttttcctgctttcccatatagaatcttaacgtctctgtattcatccctaagcaacatggtcttggcttcctggatttttgaaagttctatgtgggaaccatgctgtgcagagcctatgccgcaagccccaagaacataaagctgttcaataaatattcagtgaaagagcaaaatgattgaaataaaagtacacccaaatgggcgactgcattctgtttggctggttgttctccttgcacatggaggtgaggttctcacggtggccccaggatgaatgcagaatggacgaggagtttaagagaggaatatattacctttccataatgcataccagtgtccaggacacaggnnnnnnnnnnnnnnnnnnnnnnnnnnnnnnnnnnnnnnnnnnnnnnnnnnnnnnnnnnnnnnnnnnnnnnnnnnnnnnnnnnnnnnnnnnnnnnnnnnnnttggcagggtggcagtgttcagacaccagcctggaacacgccagtggcccccatgccacaggtggtgggacctcctccagctccacggggacactgtgctgggcattattccagggggccggctgctctccaggaggttcccaaacaatacaccacgagctgtattcacccattgtttcctttgtgctctcaaattctccccgcagatcccttatcctgggtagcctgaaatgtaatgttttctccatctgtgtgtcggtcttctttattttgttagttatttattaaaagactcagttgccaaggaggggctctgttcatgtggtgattccatattatcattcctgtaagttccctgcaattctgtgtcctttggagggctgttgatgattgctggctattatcatcaaccagctggcaaacccccctggtcctacctcactaaggaactcctgttaagtgggtagaaaagttccttcctggctgtctttctttttgtttgcattggctttaaaatactgtagcagtttgtttctttcatcttgatgctaaatacttgacagaagcaacttaagggaggaagggcttagtttgtctctcaattagaaagggtccagtccttcatgatacctgatatgtagcaagcagtattgccaaaatcctttccatctcagcagagtaggaagcaaaatacttgggctggaagtggggctatgctgtaatcctcaaggcctgctcctgaagaatgacttcctccagcctggaacttcctggcagttctaaagtcaccaaaaatagctctgccagttggggaccaagtatttgaacttgtgagtctatggaggacatttcacattcaaaccgtaaaaggtctctgtgttcatagaagtaagtgcatagagctctgattcttcttcacacttttttttaaagaaaagatttatcttgtgtgtgtgtgtgtgtgtgtgtgtgtgtgtgtgtgtaagagcagtcagtgttcttacctgctgccatctccccagctcccacgtatacctttcaacaaaggtgccagtggaagctagttggtacatttatctctctttgctttcacgttagtgttaagaattgccctgtgctttggtacccagtggttccactggagtgggcttgccgttgccagccctgggtttggtacttgctaggttttttcagacagtgcatgttttatccatcatgggaaattctcgtcttgatccttttggatactgcttccctttcttctcgattctcaaaattacttcagaagtaatctcttcctcaacctccttgtctccccgtaatttatgtatttttattgcacatatctgcttgtgtacctgtgcactcagcacagcacgtgggtggcggtcagaggactactgggagccagttctctccttccaccgtgtgggtcctggggattgaactctggccatcggtcttggcagcaactgtttttacccactgagccaccttgccgacctctattctgactattttattttaagttatttcttctactgatgatttctttagctttatctcttcttggtgtattcatctactccacgttacatttccagtgatttagtttttagaaatcgtataatttcatattttcttcctgcattgtgctttctgtttcttactgcacctcttcaaatctttggggaatgccacattagggtttctctaagaattttctattatgtacctctggggttgtttgtggaaactactgattttcctctggaagtagactgttccctcagagagttggaaacatttctattgtaaagtccattaacgaggatatgagattttggacacagtctttcaggtgaggatttttgttagctcatctgccaagctgctgggttagctacggcacagccctcatcgcttcgtcctaggccagtaggtggaaacttctgggctgtttctcttgctattgtttttatttttttacttttttggttttggttttggttttggttttggttttggttttggttttttcgaggcagagtttctctgtataaccctgactgtcctggaactcactttgtagaccaggctggcctcaaactcagaaatccacctgcctctgcctcccaaatgctgggattaaaggcgtgtgccactaccgcccagcaggctgttgtttttagaggttgatttttcatggttcttggtttatggaaaaattttgctttaatttttctgttcccagataagagcaagtttacatcttcttagtgtgagggtaaacaggaaccaggagaccataacacctgtgcctactctgcaaatcaccgggccttcttagacttacttcactattttactaggcttaggtgcattccccccttcatttctacgatctggtattgccctgcctttattatgagcttagataagcactaaaatgtatatttatctgtttttagttgccttatttactctttacatatgaagtgcaagattgatctgagttagctaactctgcctcgtcagttcacagatttaacaattttcctatgtttctcaagctactgtccttagagaatccgcaccagtctcaactctagttacattaaaaatgtagattattgggcctcatctatgttttattgaagcaaaattccgagaaagcattgctggagaatatgtatttaaaatgaggaccaagaagtaattataacaaggttgcaggattaaagattcatatacaagggaatgggttgtatttctatatcctaacagtgaatagtgggaaaatgaaatttcacaaagcaatattgcttaaatagcattatgaatataaagtactcagagataaaccagacaaaatgcaagctctgtgtggtgaaatgtataaagatagctgtaattacaggcctgtacacatggagaagtccacactgcctggaaccagtgatttaatgaggttaaactgccacccacccccagttatgtgtagatttgctgcaatcaaaataaaaaaaaaatctcaactgctttttaaaataggaatacacaagctgattctgaaattcctgtggagggcctggaaagatggctctgtggtcaagagtactggcttctcttacagagaacctgagctcagttcccagcaccaggccaggggctcgcaccgcctgtaaccccagctccagggaggcttgtcacctctggcatctgctggcactcatgnnnnnnnnnnnnnnnnnnnnnnnnnnnnnnnnnnnnnnnnnnnnnnnnnnnnnnnnnnnnnnnnnnnnnnnnnnnnnnnnnnnnnnnnnnnnnnnnnnnnnnnnnnnnnnnnnnnnnnnnnnnnnnnnnnnnnnnnnnnnnnnnnnnnnnnnnnnnnnnnnnnnnnnnnnnnnnnnnnnnnnnnnnnnnnnnnnnnnnnnnnnnnnnnnnnnnnnnnnnnnnnnnnnnnnnnnnnnnnnnnnnnnnnnnnnnnnnnnnnnnnnnnnnnnnnnnnnnnnnnnnnnnnnnnnnnnnnnnnnnnnnnnnnnnnnnnnnnnnnnnnnnnnnnnnnnnnnnnnnnnnnnnnnnnnnnnnnnnnnnnnnnnnnnnnnnnnnnnnnnnnnnnnnnnnnnnnnnnnnnnnnnnnnnnnnnnnnnnaaatgttcagaggttcaggaactaggacatgcatacgtttgatgcccttcttcagcctgtcacagactctatatatagagtgtccagtggtctttgctcctgtcacctgcagatcttcccttacagatgcttggcaccttcactgccaataatcaaactaatacaatgtccttgtttgggtatttataaatacacccacctataagcacaaagacttccagcaagtatcatttgaggatctcagtggctcaccggggtggctagacactgctactatttttacagatgagaaagttacaatgtagaaaactcagatgagctgcctgcctgaggaactctgtatccaggatttgactccagtttgagtcacacggtgtcacacatcccatcccctgtccagttcctcgccattccagaaagacacacagctcccatgaaatggtttaattattgcagccaggagaaatgcccaggtgcctaagccatccagagctcctcccaggttccccaggatgcctaaaatttaaacccaacaattcacccaacacttctgtataataccaagaatttaaaacatcagtcacctatagacttatcactggttgaccagatctactcctcaaaactagatgtgaattacattgtctctctctctagactgctatgcccaggaactgcaatgtaacgataaaatagtccactgaagattctaaaagcactaccaaattgccccctggccggaggtcgaaggaaggcacagagatgcacaaagaacttaaatgttcaccaggggactatgtgggaagatgagtcaacagggcacgctgggtttgacggaaggaaaataggccgatgtgttttcacagaacaatccggggcaaaccgctctatcccctccaggctgtgttacacatggcagctcaggggaatacaggggctggatgtatgggttgctaacttgttcagtccaggggtgctttcttcttcttcttcttcttcttcttcttcttcttcttcttcttcttcttcttcttcttcttcttcttcttcttcttcttcttcttcttcttcttcttcttcttttcttcttcttcttcttctcctcctcctcctcctcctcctcctcctcctccttcnnnnnnnnnnnnnnnnnnnnnnnnnnnnnnnnnnnnnnnnnnnnnnnnnnnnnnnnnnnnnnnnnnnnnnnnnnnnnnnnnnnnnnnnnnnnnnnnnnnnccccatttctcccagcgccatcttggttgggttcttaccccacgggaggggcagaggagctccgtctgggctcctctgtagggacaccgacctcattcagaaatgttctgccctcatttattcctcttccccaatgtccacattttaatcccacaaccttgggaactgagatttttaatgcatgaacctgagtgcaggcctgcagagacacggcagataacaagctgtcaaaggccggcgctctgcatcttccggtatttaatgcaatgaagcccctcacctttagggattccaggctcatcaaatgtgctctgatgagcctcccttcatccctgttgtgtgcagccagcttacttcaaatgtacataagaagctttttttttttttatgctttaagagcactctcttccagtaaggagcctgcccttgcagtttatgacccccccccacacacacacacacatgtttgctcctcttgatgctttttttgctaaaacaagaaaaatatctgcttagaaaatcctgtgcagaaggagtatttgtagctgtgaccctaagatttcaacaagccccccggaacaaagggcattacaggcatttggccacaggaagtgcctatctacagacagggccagctcctttaaataataaataatccccaaagaaacaggggcccactgcttattacaacacgtgtttggttttgtttgtttgtttgtttgtttgtttgttttctttttcttttcttttgttttaacagaaggcagtcaaggcaacacatggagaaggtttaggcctgacagttataaatagccccgctgtttatcccatgatacattagcagccttctcccttgactagtctgtgatttggaatctcaatcaaaaagccatttctcctgaccacagagtacatgtcattgcccagagactggaattctagagggacagagaaaggcgacagtatttggatgttctgaaagtcccacttatatcagagagcagtgtttctcagcctgcggatcgcaagccttttggggagggtcacatatcagatatcctgcatattatatatttacattatgattcacgatagtagcaaaattatggctatgaagtagcaatgaaaataatttcagggttgggggtgtcaccacaacatgtggaactgtactacagggtcccagtgttaggaaggttgagagccactgatcctggggtatttgacatcactgatgcctgtcttccaggaactgagcagagtgaagaaaccctctgaagagattagttgtcccaaatactgtaaaaatcagtctcgtttcttataatcaaagatgtaactgcctactggccatgatattgcctagcacaagatgcacaaaaggacagtattcctctctctgaaagacagtgatgataaaaagctaaagggcaacagaagacagtgggatgtcacaaggcattataattaatggtggcaacagtgaatgagaactgtcacttgctgtcacttagtagttcctaacgtatttactataacaataaaaactaaacctaacaggccatcaaaagtgttttgagtattccaagttatatacagagcaaataaatccttctgcccaggaattagggccagtgtttgacaactgggacctcacgaaactaaaaagcttctgtacagctaaagaaacaaccagtcattgaagaagaaatccccagagcgagagaaaacgtgtcagccgcacatctgacaggcaccattaatatccatagtatacaaagaactcagagagcagtcaggaaaacaaatgacccaattttagaatatgtgttagagatctaaacagagttctcaatagaagaaataaaaatggctaagaaatacctcagtaagtattaatcatctttagcaatcaggaaaatgcacattaagacaactttgaggcttcatttcaccccagtcagaatggctaggattgagccaggtggtggtggtgcacacctttaataccagcactcaagaggcagaggcaggtggatctctatgagttcaaagccagcctggtctacagagcaagtcccagaatagccagggccatgcaaagaaaccctatctcaaaacaacagcaacaataaacacaaaatcccaaccaaccaaccaactgaatgaacaaataaagaaacaaaaccagaatggctaggatcaacaaaacagctggtgaggttatggaaatatagaaacttttattcactgttggcaggaattcaaattggtgcttcaactctggaaatcagtatggagaattctcaaaagaaaaaaaaaagtaaaaataaacccaccacatggcccatctgtatcgttccttgtcatttggccaaaggactcgacatcctacttcacagatgttcattgccagctctgttcacaagagctagccacggagacaacctacatgcccttcaacagatgaatggacaatgaaaatgtcatatatacccaatggaataatactcagctataaagaaaagttaaatcctgaagtttaaaggtgattggatggacctagaatagatcatcttgaatgaggcatccaagacctagaaagacaagtgccgaatgtgctctctcatctgtggttcccagctccagatgctcaggtgtgagtgtacaacatggagtaaccatggaaaccaagatagtatactgtagacaggtagcggcaaggtgatataaagtgaggaatggaaagtgggaggggcgtcaactggggagaaaagtagtcactcaatacagagaaggtaggacaagggacaaataccaccacagttgtttgatagagcctcaaggcatcattatttttatatctacctaaaactgtaattattcacagtgtgaatgtgtgtgtgactgtgtgtgtgtgttgtgtacactccccaacaagaaccatagactgaaaaacttccagtatcagtcacaagaaacatcctcttgtgactcccaaaccaatatagactatcagtgtagcaccttggttgcccctcaggagttgggagtgggcatctgttgccaaagacgcagcatgctcaggacacaggatacggatgactagagctgattttgacttgaaaagcttccttcctgccacccagaaatggtactaggaaataccacgcaaactgctgagggagggaagaattatgcagccctattcagctatattttaaatgaaaaaaaaaatcaggtacaaagtaatatgtaatttatgctcacacttatttatatcaacagttgctttgatatatacttaagcacagacaatagacaccctaatgttgacaataattattttaagaaggtggcattatgagagactttatatatctggcaatttctatttaatcttatatctagtgaagatatttccacatcctaaaagaggagaaggcacgagagaggtgggctatgtgccctttgttaactctgggtctattgggaatttgttaagacacatgcatctgagatcattctatgacctccgtggaatgaggtagaaaacgttctgcaaaatggaggagtccgagtcagatccacaaagttagacagctagttctctggttcttcctgaatctagatcaaaacagtgttccttagtgtctagtggtggcttccacttgatgagtggcatcaatcattggtcaccccctcagattcagagtaactaccttgatttatttaaaacttcaaaataatgctaagacttggttaaatacattgttttaattgatgcaataattgtatatacaataactacattgcacaatatgatatttggatatggatatataaatgcaatacttgcatatataataactacattatacaatatgatatctggatacataaatgcaatgttatgatcaaatcaaggtatgagttcttccattgtctcagccatttatcattgtgtcttttagcatttcgaaatatccaatgtatnnnnnnnnnnnnnnnnnnnnnnnnnnnnnnnnnnnnnnnnnnnnnnnnnnnnnnnnnnnnnnnnnnnnnnnnnnnnnnnnnnnnnnnnnnnnnnnnnnnnnnnnnnnnnnnnnnnnnnnnnnnnnnnnnnnnnnnnnnnnnnnnnnnnnnnnnnnnnnnnnnnnnnnnnnnnnnnnnnnnnnnnnnnnnnnnnnnnnnnnnnnnnnnnnnnnnnnnnnnnnnnnagagagagagagagagagagagagaggggggggggtgctggagatgttacacagggtttttttgctgacctttcttgccctcttccactgagctgtagccccaccctatctgagagcttcctgctctctgccctgctctaccattcctctacccttagctgcagtggggccagctttagcgtttgcacaggagtgagaacacgtagcatttgcctttctgtacctggaggtcaactttcttaattgtcttttccctgataaaatgtcagcccaaattgctctgtaagctgttcgttaaaggtaagaacccagcaatattactgtttcctaaagacgagagatgacctccaccttagttaaactgtagttccctcggtatcgaacagtaccggaggggttatttaagaagcttcgtgctttacattggaaataagaagctgtggatggtttgggataataaagcactgactggtgtactaaagtcagaattgctttcataggccgagagatccgcttgcccctccgaatcagaggagaaggaatggggcccaagcttcacttcaacttcgaattactggacattggcaaagttttcattggatctgctcactgttacgaggtgggcaccaccgctgttcactgaggcttccaacagtacctggctttttccctctgcttcttttgatgtgtgtgtgtgtgtgtgtgtgtgtgtgtgtgtgtgtgtgtgtgtgtgtgtgtgtgttgtgtgtgtgtatgtgtgtgtgttgtgtgtgtgtgtatgtgtgtgtgtgtgtgtgttgtgtgtgagtgtgtgtgtgtttttatttgatagaaacttggttcagttgcctcgttttgcattttctgcctcaattctaacttctctcctagtcaaagcaggaatgtcttttcccattcttttattttgtcaatcgctaaagctcttcagcactgtgatttaattggctttatccttctcaatttgtagaccgcagagggaaaaaccataaatacagctccccatctgtgtagtgcttgttccgggagagcataaatcctacagatcagaggagagagagcttttttgcatttttgagagtgtcctaatgaggatagcgatttccacactttaggatctcctcttgaccctctctctcccccaatctgggttttaataaccaatcttcacttttctaaaggagtgtgttgtgttctgtcttcccaattaagcagaaactggaattttccaacaggaacttttggtccttcagagtcaaagtcactccagtgtcacctcatggatcagcttacacttacacaccattgttacatgccctcatatatatgacatatatatacaagtggctaccatggaaacttggttttagggtgctcctagattataaatgtttgtatcttagggaggtaatgcaagcagttatttaataagtgataagtagctgtcaggctctgggacttagtgtgtgtgtgtgcgtgtgtgtttaatttacaatctttacagaactgtgaaaggtaagatttattatcctctgtcatgagaaataccagatgcacatgatcagttcttctacagtattgccctcagggattgttggtaaagtgctggtactttggctatagtctctactcagtccttgcagaaagcctatggagcagggacagttgctcctcccacttctggccaagtaagctggggcctagagaagattctcctacttaggttaatgatagcaaaagcatggagtgaaggctcagcagacactcttctccagcgcagagtgctggagccacagcagtcacttctagcacagggctgcaagcctgacgcctcccctgtagcatgctggctgaaggagaaagctctaagaaatgcatgaggcttttataggagacagccttacagatagcatgttaccctcacggtctattacctgtatgggtctacaagggtggacagagaatctagtcatgaccgcagtatagaagaaatgggtggcaaccctgaggggccataggtgtaagaaacttggccaagtcactcaccttgagagcatcacacgctctaggaatagggggtgttttactgatctttgagtcctgcggttcccagcaacccatctttccacaccaagtcgatcccatctacaaggagaagtgcctacattgacatggagacaggggacctccttcccacactcaccggggtaaccgagctgaatgagacaaaacaaaagcacacagatgttaacatcaggatccatgatctataaaggcacaccacctgagtaatattaaaacatgagagagctatatacacaagctaacgtctacattattctatgttgtgtgatcttgagggggaaaaatgacatttcttattcattgatgttgcttgtgtaatttatcccacgtgaattctccttacaccttacagattgatctttatggatgccacgccaggaagagacatttagttctgatgcaaaagggagatggtttccctgcatataataatcataattttttcttttagcgactgactaggcatgcccagattttaactgcagagcaaaccccagccagccaaagtgtgcagtgaggtgaggtagaagattggacagaggtgaaagtggcagagggaggtggtgaggcgcgtctacggggagattctgcactctcggcatcttcaatgctgaatcttcaatgctgatgctccactgcgcctcttaatttattatattacctccttgagaaatttgaatgactagctactgaccttagtcactgctgagctcagcagatgcataaggaaaaaaactataatcccaagagaatgcagaattctccagtgcaatccaggggcaaaccaacaggaggtcaagttctattacaagtgatcccctctcccaaaggttggacctcaggggtaagagcctcaggaccgtgtcccaaactatcggctggattcaatattcccaaatagatgtttctttgtcaggagtaggagaatgacatcatattctccaaggtagagggacaggctgggagatgcctctgtcagtaaagtgcttgctgcgcaagcatgaagaactgaggtcagatcccctagaacccatgtaaaaccctgggcatgatggctcttccctgtagtcctagtgctaggaagatggaggcagaaagatcccagggcgagccagctagtcttgctaaatcagtgagtgccaggcttagtgagagactctgagtctaagaatatggtggagattagtcaaggagggcactggatgtgacttctggcctccacatgcacaggcacatagacatgcatgcatctgcatatacaggtacatacccacaggaaaacacacacacacacacacacacacacacagagagagagagagagagagagagagagagagagagagtcactgttcagaaaacctgggaaagatagccatgttacccaaacaataataaaaggaacaaacaaaagggatttgtctagagagaacaaaaaaggactatgaatgccttaggttctcaaccttcctagtgctgcgacccttgaatacagttccatgtgttacatggtgacccccacccacccatacaattatttttcttgctatttcataactaattttgctactgttgtgaatcacaatataaatatctgtattttttttaatggtcttagtagactcccgtgaaaaggttgttagattcccgaaaaggcgacccacaggttgaaaacctctgctttcagggttgtttatataatcgaggtatattgtatatgtgcatgaacgtttccaagaataactaaaaatatttaaaacaacaacaacaacagagtagcctacaagttaccactagcatacctgagctcctctttgagtgcagttaaattctgtgcccacagtgctgggctacagagatgcgagtgcatctttcagttgtaaactctgttgccagggttttacaattacacgaattaatacatttactctcctaacaatacaggaagtggaagagggcagatggggaagttggggcctagagcaattaaagagtttgtctaaaattgcttagctaggaagttgaatgcaaatctaggttttgaatccaggctgcatggctcctgagtccaaaaataatcatttttctatgcggtctctttaaaagagagaaagatgggagcacaatttgaactaccgagaaccttagaacagggaagtttggaaatagacataaaacggtgagccaggcagtgagcaaccttatttatggttttgttttggtgcactggttatctgcggttggcagaagtgctctgttcctccgcagaggacacagccttctgtccagagcagcctgagcctccgagcttagtctcctcgacctctaaccacagctgatctccttggccacctaaaacactgtcctgacaagacaataggaaccatgtggtgtggtaggggcttcctctggacagggtgctgggttcacattactatagacactctccccaactctgagacagccccctcctcctgccacccccatcctcgcccttcagcacttatcccaaagcaggagataaccaaccatacctcatctccacctctccctccctggacatctgtcctctgggttctgtagccacaccccatcacagtcactctcttcaaggtcagggtgacctctgattatacataagaccccaggctcgtttcctccgccccttctgctgacctctgtccacatttcacgtttatgggactccttccttggtatccagcatgttctggaattcctcactgtggcattctcttgggtgcctcacattttttctactaagtttctggatgtctttggacacttctcagtttccacttaacctaaggctccttgtgcacatgcacctctttgcttgcttatggagaacatttaaggggtattctaagagtctccatccatagataaaatcatgaccggtctccatgatagctaactcgctttaactaacttccagtgtcttgggtgtagattaagggatattcctataaatcagggagaggaagctagtcacccttctaggtgtaaaaaggcagaattgtcaaggaacaaagaacaatgtctttgcaggcagaatagaacagcatgactgtagtgcaggttcatgcacatgaatggggcggtgtgggtgggaacagcaaatgcaggccagctgtggaagactctgcatgccaggcgtgagctcctcacatgcatactcagagctacattgcactcagatatgtgcactagcatggtaccagggcattagcttacaagaatagaacacctgtgctaaaaggactgcttccctacgaatccccaggcagcccgtcatccagtggcgttagagatgagcacatcccaggaagacgaattttcgcagcctcccagagagtaccctcatcatccagggtcctcggtgacatgtgacatgcagtctctaagccctgtgacaggcgcaggctgaggcagttggtgctgccccaccctgacctcctttcttctttcacggccacatttaacctcagtttcctcatgcatgtgagagaattgtctacccttttgtggttactctatagagaatatttaaaagatagtctgagtcctcattcatagacataactacagccagtctcttagtggtataagtataattcaaatgactaatttaaagagtttttaatttttagttatgtatatgtgtgtgggaggtgcatgtgagtgcaggtgcttgtgaggtctgtagagctggagttcatgtagtcaggagccactcaacatgggttccatgaatggaaccggggtcctctgcaagaatggtatgcaccctaagcctctgagccatcactccagccccaactagcttaatcttaaagcaaacaccaaaagcataaaatgaccttgcggtttaggagtccagtcttcaagcattgagaacatcagacaattcagatctcccaagagtttcccgtggtcataattccctcagttttccctgaccctgagtaatacatcatgtatttaaagggaaactgaccacagttcccttgacctgaccgtgtttgactttgtccaccgcaggcaatcctgtccaacaagggcagcatcgatgccctctttaacgtcatccccccaacttcagccttgggggcctgctttgtcttcaatcctaaagaaggcatcattgaaccgagtggggtccaagctgtccagatctccttcagttctaccatcctggggtacttcgaagaagagttcctgattgatgtcaacgggtcccctgagcccgtgaaaatgaccattaggtacagtatactcgtaactaaggtagaaactgactggagttttcccttctgccttctagagcctcataaggtagatcgtatcttagatgctcacaatgtgtccaatatcatctgtgatgtctgttgatatgaacctttccgcacagtggaatgttttaaatgcccaccggtgtttctttccatattggatgtccttgtaatattgatgcaaatatgctatgttgacatctggtttccctgtaagttgtagcctatcaaagaaggatttaaaccaatggttctcaacctgtgggtcaggactcctttgagggtggcataccagatatcctgcataccaaatatttacatcacaattcataacaatagcaaaattatagttataaagcagcaatgaaataattttgtggttgggggtcaccacgacatgagtatttattaaaaggccacagcgttaggaaggctgggaaccactggcttaaatactgacttctagttattctctggggttttctacccaagtgctaatcaggccagacccttctgggcttctgagaccagatgatattgggcacattgtgtagacctcaccccatgttttaagatgtttggagaaaatgagctttgtctattttcagtttcactgaacttttgtcatttgtttttatcatatgaaaattctataaacagccttatttacgatgcccttgagcactgcaaaagtgaccacttattagtctgtttgccaaggatagacacttaaagcttttatgatagaagtcttttgagggttttccccactgcttgtggtaactgatagtcacgaatagaatttgtccatggattttgaaaaaaaaatatttttacaacccatcaggattatattgaccactgctgcttaaaaagaccatttctcccaaatagaaaaatcacaccttcaaaacatatcaccctgactctggatgccagccacaagaggttctttaaatacatgaaagtctcttttacggttactgataacaggtcccatccttctacaaactgatgtgtctcttggagcctgggatggcacaggaaggaaaggcaggatggttttttattttgttttgttcttttaaagaaataaaaaagtattgatctcgtatctactagaaatttagaatcttgagatcagctcgaaggctctttttgtttttttctcaaactcacctccagaactcctgctattgcctaggctgtgtccgcagactttcaggtactgagtcttagcatctcggcatgtgactgtccttggagatgagacccttaagtagataattaagatggagtcataggggtggagtgtaatccactagaagtagattagaaatgaagattagggcatagatatagagaaaaagacacaaagtagacatgccatctacagctaaaggcagaagcccttgttaaaaaacaaccattgctaaggctcacccttccaaggatagaaattaacttcatcatttgctgttcagttgttgttggtggtggtggtggtggttgcagaaagtcactaataactaaggagggcaaatgacagtacctcatactatgccttgggacttaccccaccataattaggattttcttaaaacctcaaggcttacctgaaacatacttgagacatctataatttccccctcaaacatccatgtttgttataatattaaaaatccactcaggcatggtgtcgcacgtctgtcatcccagcacttgggaggcagaggcaggaggattagagttcaagatcatctttagctgcatggcaagtttaaggttaacctgggctccatgagaccctatcttttaaaaactattaaaaattagagttgcttcccaaatagttggaagcacagactcccccagagatgcggcaccgacccatgattcacatcctacagcatctgtaccacatgagaagcgggggcgggggtgggggggacacttccccacagcatgagcaacctgctcatttcttgtgtccctagcaactcacatctcacaccacatgccaagctgttcctctggtcccttgagagtcctttatcatccctcagcagatcaactctcccaagtttttgggtcaaactttctgacttcctgatatcactatgtgtcgtcaagaatcataccctcgaacaacatccagcaaccaccgtgcttccgcacaaagccgtgctgcaggtgcttacagatctactctgttgtgggcttaagacagaggagagcctttctgaatatagacagcaataatccttaacaataaaccaccaaaccaacctataaaaagattaaacaccaggatcagatgggttttaccccagaaagtcaaggctggatcacataggaaaataagccagcgtgatgggacgttggtgccatacaatatcacaaaataaaagagcaatccaaggcgtgatctgagcgtatacagaaaggcctttgctaaaacccatcagtcctccatgatttcaaaaggaaacgagatcaagagctgaatcatacacaaatttgctcaacataaatcatcggcccaaacttaaggccaaggctatgagactgttcacagcaagcacacataaaattatgcatggctttggattagacagcagtgtctcacacaagacacctaagcacagagcaagcaaaggcaaagaattaaagtagactttttcaaaaggtaagaagatttgtgcttcaacatgcactaaccaagctgagtgggagattgtatttgcaattcacggacctcataagggacttctaactaacatatacagataaaatgcagtaagaagataaataatgaagtttagaactagactgagcttttaagacacttatctcaaaaagatagaagtctgagcaatatcatggttcaggaggtgtttatcaagaaagtccaccatgccatcctgtagttggccctaggcagcaaaatgcaaaatgaacactggcaaggatttggcgcaattggagtatacacatattgatgatgttgtgacagttagtattgactgtcaacttgacaggacctagaactacctaggaggcaaacctctggacttgtctgtggtagagtttctagactgcatctatttgggtgagaagacctaatctaactgggctgggatctcagactgagtgagaaggagaaagatccctaactgcagatatcacgtgaccagaggcctcaagtccctgctgccatgccttcctcaccatggtgggccacgcccttaaactgagccaaaagaacccctccctttcttaagttacctttcatacagatacagtgtcacagcaatggaatacaattgaatacagatagaaatgtgaaacattgcagccaggataaaagtgtctagttatatgaaaataatacacataagatcatgtttccagccctgtgttgttattattatgacttcacatattatttggagggataaacttttcttggggtccctgtctcaagaaatacctatgaagttaatagtgtgaattctagaatttttcttattcttttattgtcaggtgccctgccctggaccccacgtatttggggctggtatatcttataaaaggacaaatagatgtttgctgtccctaatgatcatttaattacatgacacagtattttaaatgattgaataaactatgatatgaaatcgatgtgacgttcaatcatatcccaatgagaaatcttgttctctctttctctctctctctctctctctctctctctctctctctctctctctctctctttctcttctggcatatgtaattttataaagttttaactattcacagatgtgcttggcactttaaattgcctctcacttgcatgctaatccaatcagtctgagtctttgaaatgatcccattagcaggttatcgctttgctggatggcccggtaatatcctgttagaattcacatgaccacatccaagtccaggtggcatcatttagtgactgttctctcggtgaccagagcctttgattgcatgtgatttatctctgtgcctttcagcttctgcactgattaaacgactttatgcagtttcccatactcttttccttctttcttttatccctgttcatttcatatactttctggtctacttgttcctctggcccccaaaactatctcttccaactcacgtagctaaattgtcagcctctttggcttcattctcagctggaccctcacggactgctgggtaccagacaggcttttggaaatcatctcaaatcgtcagcatgacatggagtcacaagagtttagacttgcagcttgtcacaatgagtcttggccgtggtcaccctccacttctcctcaggagcctcagcctggcagagccacttctccagcagccaccggtgttactaagcctccagcgtggtgcatgtgacatagcatgtgtatggaacattcagtccttacctttactatcattttaaaagatattgattatggagaacaatgattactgcctaaccagtaaatggaaggcctgccatagaagtgttctttggctgtgataaacgatgaccacaaatttagtagattaaaacaatatagagacctaaaattattattttagatatcgatagactagaagctccacactggtgttaatggagccaaattaaaggtgatggtagatctatgggtctttctagaagccccagaaaggaatccatttcccatgcttttatagcttcttcaggctgtcccttctctctggccaatgttggtagcagcactgatctatggtataagtacaaatatctagaaggtagtttgatgacatctctatttaataaaacaacagtagctggttactacctatcacctatgatctctccaaccatggcatttaaaaaaaaaaacaatcaagtttacactaccaggcatgaattttctcctatggaactagcttaaaatccaactgaagactcactggttgcttccctaacagtcatgccactactgtactagatcataccttgcttttcaggttagggttttttgtttgtttgggtttttttatacagggttcactgctgagtaagaagactgataattcttttcccctagcagcctgcgtagcactttccaacactctgaaaactagctcacagggaagacattgccaaagaaccaatgtacattttatttatttcctatttattttacctttaattatgaatatatgggatggaggacccgtgcacagatgagtgtaggtgcccagaagtcataagaaggcatctgattccctgggcctgaagttataggcagtgtgagccagcgtatgtgggtgctgggagctagattccagtcctctgcaagagcagtcagtgcatgatcttcctcactgagccatctctcccgattgttgtttctcaaggagttgatttcagagtatatgagtcatccaggttaactacattttgtagcattagcttggtgaactggctgcctattccctggtcactggtaaggacaaggttatacacactaaccacagtcatttcctaaaacctagagtttgccacctggaaaacttttttgtgtatgagtgtgtggtgcacatgtatatgccttcatgtccacatgtgaacacacatgaacacatgtatgtggaggcccaatgagacagtcggtgtgtttctcaattactctctgatttatttgtcagggtccctcactgaacctgaagctcacctgctctggttagtccagctagacatcatgcctcagagactccctgtctctgcctcctgagtgctggtattacaggagaccccatgcttgttcagcttttataaaggggctagggttccatgcccccatacaaacgcttgcacacaggccctgtgcccactgagatataccacacacactctgaaaaatgattgtaatgtctactgtgatggcttgtcctatcatggcttcttagactctgccattgacctcataccaaagtttgcttatggtgtgtattcccttcccggttctgatcattacctcgtctcattccgtttccccaatttgtgtctgactttcagaggctgtgtaattggacctacattccattttaatgtccctgcactgaactttgggaatgtttcctatggtgagtaactttttctttgttctgtgtgtgtatgtgtgtgtgtgtgtgtgtgtgtgtgtgtgtgtacatgtgggatcttgtaattgtattttttatttgcctgttgtaaatgtcgtctccaaggcttactgcctctgtctgctaacctaggcctagttctggaagtttctagcctctttacaatctaatctaggcctgggcctagaatgttttctgtctctgggacttactgatgaataagcttactctttctagctctttctgaactctggcttcagagttgtttaactcagctgttctggctcaaactcctctctaaactgactgattcaatctggagtctctcttggcctctcacggaattggcccgaaactaactctggcaatctgttctaatcttttgtttgtttctttctcattctctggctcattctgtcttcacttgtgtctagcttgttctctcttcaacctgtctctataaatctgtcctgataaaactgcctcttatttccaatctctctctctctctctctctctctctctctctctctctctctcgctctctctctcctctcctctcctctcctctcccccgcaccaccccccccatctccacaaagtagttttcctactttgtctaatctttctctgattcatcactttgtctgcttctcaattatcactttcaaacatgggtgcttctttctacaaatttaactttaccttcattgttttggattaaaggactgtactaagggtgtgtctgtattccagccagaggaattaaaggtgtgtgctaagggctgagccacaccacaactaaaaacagggttttatttttttccagtaagtaacacgatcttggggttcatgatatgatcaaatatcctgcaacagaatctgtaggacaatcttgaatgccagccctagaaataccatcttcctccttgagactgtctcttccaccagcctggagctcaccaattagactaggctgctgaccagtcagccccagtgtgttaatcttctggctccttctcattctctggcttgttctgtcttcacttgttctctcttcaacctatctctataaatctatcctggtaataggaatggcccacatagactcatgtgtccataggaagtggcactattaggaggcacagccttgttatagtaggtatggctttgttggaggaagtttgtctccaaggagtaggctttgaggtctcagaagctcaagtcaaacctaatggatcatattctcttcctactgcctatggatcctgatgtagaattcttagcttcttctccagcaccatgtctgcctgcatgccaccatgcttcgcgccatgatgatagtgaactaaaactctgaactataaaccagccccaatttaatgttttcctttataagagttgctatggtcatagtgtctccacagcaataaaactctaagacatccagggatcctcctgaccctgtctccccagcacttgggattataagtacacgcacctgtcttttcatgaagtgccaggcagggatcaatctcagatcctcatgcttgcaacgtgtttctgactagttttatattaacttgacacaagttgaggtcatcttggaagaaggaacctcaattgagaaaatgttcccatcggatcagcctgtaggagagcctctggggaatttttcttggttaattattggcatgggagagcccagtggtgccatcccctaggcagacagccctgggtgtataaaagagcaggctgtgtgagctatagagagcaaaccagtaagaagcatcctaccatgctctctgcttcagtgcctgcctctagatacccccttgagttcctgccccaacttccttccatgatgggctattacctggacgtataagccaaataaaccctgccctccccacattgctgttggtcatgatgtttgccacagcaatcgaatgcaaattaacacaccaactaagcaactcccccattgtaagtttagaaattggatacagtactactaggtctctacccgggagaaggaaggtttacaaagttgcttgccatttctaatagctagctagccaagaggatcccttcctctgtggcacggtcattttggtgctgtttctaaatgatatgtaaagtaatagctaggccctgggtactaagagctgcaaagctatggatgttgttctttttccagcagtggcactagcaacctcatgcatcatgtcactgtctagacattctgtactctttgtacttgggatttggaggccgtggtcgtagtggtgacatgttggcgattttgttttgctctctgacagtgctgggtatcaaacccagggctttgtgcgtagcaggcaagcactctatcagtgcacaaaagtctcagacctgcactgtatctaaatgcaaattctgatttgcccagctggctgcacagcagcctccttagagagatgctttggggttgaactgaggccgttgtagctcctgggttcccgtgctccaggttgaaggatgttccatctgtattgtcatctcatctggtatctgtcccatggcatttctccctgtctatatttatccactgataaaaaattgtcaactgaagtagcagaagcagaaacagcagcagtcgcaataatatctctctgccttgtttcttgtggcttttcactgctgggtccatggcatgcagtactgtgcttgaacccagcaatccttccctgaggtgcagttactgtagttaatcagaagtggagctttgagactgccaaatgatttgtcaaagacatgcaatattgctatttgttctgagagctgctttcaactgggatcttgccccagtgaggcaaaatttgggccttggctgattacaaaaagaaactcagcatttatgatctctctgtgtcctagcctatgtaaccaaatcctattccttagtatagaatttctctggagaaagagaattagaagtgtatttagtaggttaatctgctttgatttgaaattaatttcgcccttctatctagaaggtgataataagaaaagcccagattgagaaatgtgtgtttaactccatatccctattcttcacagtccgtttcactgtttcctgtttgtcttgcttcaggttgaatgaacccacctactgtggggaaaaatagttctttaggcaaagacctatttgtaatgtgtttgttggctgctttgcatctggtgataggagaatttcaattattcagaaaacattctatgatggccaccacatgcgtcatactgcataaagcacatgatctaggtctatagactttccccagattatggagctcctatgttctgaatgctttctgtgaataactacagaagtaccacctcatttgcaaagtgacccacccacgtatttccctctgctttgtgaagattcttggcttactagaagcactgggattctctagtctgtgttctcgatttcccccacgaactcccagaagtctctccaatgtcatttaattattggtcacgcacattactgaatcggtgtagtatcttcatcacgagggcccattgtttagtggtgaacttgtgcccccatccatcaactttttgaagaccctgctgctgcttctgtgtggtccaataatcccacagcttcctgtttcttcaagagatcttatgggtgaagattccgcacagtagtagagtgcttgcttagcatgctcgaggccctggatcccagttctagtgacagtgatgcagacaggcagacagacagacagacagacagacagacagatacctttatttgtttttattttatttgtataggtgttttacctgcatgtatgtaagcataccatgtgcatacagtgtgcagtgaaggctagaagagggcatcagagcccctggacctggagtcacagagggttgtgagctgccttgtaggtgctgggaatcaaacctgggtcctctgcaaaagtaatcagtgatcttaaccactgagccatcttaaccccaagaaagtgctgtgttttggttgtttgttttgttttgttttttagaatgaacttcttaatgggcttcttggggtcagataaaaatataaatgttgaaggagaattaaatcttgtgagaacgttctccttcaaatcagcgtttgaatacaggaagaagcataagctacctctccgattccctaggcattctgtccagttgtttttaattaattatcctaagactgacctacagatgctaactggaaagaataaggatgttgagcactgtaaaatactttcattcaggtaggactgtggagagaacagactggagatggaatgggtttgggagcaggaggctaggcatagcattcataccaataaccattcagtctttaacaagccaacaacccctgctgaggctctgtgaaggatatggggcaatacagactctagtatgaagaactgttttgagtaagttttaatatgttttattctgtgaaaaaacttctggctaggggaattggtctgggcagttgtttggaggaccatgtgactgtgaaatccacttttcttaataccctattctagtagaccacctaactaattaacggacatgtagggtaagtatacttttcagagtcatcactgggcaagatctgaagagtccaacatagcaattgcatggcagtgaagatgatactccacccgtttctctggggtttctaagagaaggtggtttgaggcagagaactcaaggctgcatctagaagaagcatgccaactatcctgtagttattcttgatctaaaagtgacagcaacttaaaagccacccaagaaatccagccaaaagtctatttattgctttcccagcaaaggagacctacatctcttacaaaaggaatgtgagtttcaccaaatggaagccagtggggctagatataccctgacacaggactctggggaggtgcactagtcgtcttctctggctggatctaactcagatcaccaagtctttcctgggaggggatattatcacatcctatgtcaacagccccgagagcatggttctcagaaaggaacagtacaaattttgtcacctcttggcacagttctagatcaaacagcagacaaaagtacgcagccttttcctttcacacactggcaaacaggactagtacaattctacattttaaaaatctgtgagatcaaaggcaaaatacacttctacaagacaacttacaataacgaacagtcaaggctgcttctttagatgggcctgggtgacaaccgagggccttgttttatattgctgtttaacctccacgactaaatgcatgataaatactttagttaagtcatgaatgcatgaagtgtatgtgttggtgtatgactggggatttaaggagctaacagggaatggatataagcagagggaatgacacacatctgtgaagataaagatgtcacagtgagaccctagtttgtatatacattaaacatagttttaaagagggcctggggatgaggctgagacactgaagtgccaggagggcaatggaacctgagattgatcgaccggaacccacgtgaactatctggacgcagtggggcatacttaagataccaaatttggaaagggagagagacaggggtccttgagttttgctggatatccagtttcccccaaccaggaaaccccaggctcagtgaaagatcctgaatcaaaaaactaaagtgtatagaggaaaacacctgatattgagctctgacctgtacgcatacacccaccacattaaataaataaataaataaataaataaataaataaataaataaataaaatacacacatacacatgcatgcacatgcatacacatacatacatatacatacatataaatacatatacatacatacttatttacttacttacttaagacaagttagaaagtaatgagacatagtaatgcattatatatacaatcctaagtcattgccttaggatttgttgatcaagggaggctactgggggaaagaagtctttctcacctcaaattttatcttccaggatttccccataccttgatgtgttccctcaataatacatctttggtccccatgaccttcaaactgcgtgtccgcggcgatggcgaaggcatgagtagcatcccaagttactctcaggagtcagacagcaagcaatggtccgggattaatacagaaatgcctaccacaaaacccaaagaattcaccatctctcccaacagtggcaccatccgtgcccagggctttactgccatcaaggtaaagtgtgcagctgtcagcacacacagccaaacacccaccacctttcagatagccactgatatgtcacctaggggtttctgtccaaggacagtgatagggaatgccgtggggaaaccacacgcaaagctgggccatgtagggactaagcctctgagatcacagaaccagatgcaaataggttgggcaaagaaattcacactgctcaggttaccggagtcgctaaggttggagacagtgttcagccaattctagcaagacagtcctcaattagctgagtagagagacaaatttccatggaaagaggaacaaagctatccagtggctcccactccccagtcctcttggggtcctgacatgagacttgcttctggcctggatatggccccactcatcatcacgatctcagccctagcctctcctcagaggtagtctgaccaattgttggaaccagataagatctctttccaggcaaaaagagccttctctttctccagcttgagattccaggagctgatggggagagggactccagtatcttggggactattgtttcaataatctaatggccaaaaggagatcccaagtgtctttagaataaccttgttctcaccagaccagacaaaccccagttaaatggatatccactgagtctaacatgaatgcagaaccagtatcttcataggagccgtggcttctagttatttctagtacaatccctgttccatacagacaacacacccactgactctaatagaggagtggaagaacccggagtctggcttcagattcaggtcctccacagccatacacatccggccttatgccaagctgacagctaggccaatcaggttcgcagtataaatctggatcctggcaaatgtgggtgccatgtgcctttccactagagctttggatttaagtccacgggaagagagatacgaagggtgcccagcaccctacttggtctgaaatcagaacagtgaggtggccatagtggtgcctcatggtgcccccagcagggttacttcatagttaaccaagaaaggcttcagtcttctctcttcacctttgcttctccagacaccaggattttgcaaaagggaaggttgctaaatccaagtggtttctgggaaggaaagacctcacagctagaatggctaattctgtagatattatcattgaatattcattcaatccagcaactgtctcatccccaggtttgttggagatgcttttcaatatctcacctcaactctattcatttcaactcttcttttcctggaatgttcagccattccatgggcttctccaggggtctagagaaactcgctctgttgttacattctctctggagatggctaactgactttccctggaaggagctcagctctggtggctttatttttcacttggtcctcaacctcctccatatcatctatctgtccttttacccctggagataccacaggagtgtggaaagacagtgtctccccaccagcctactgccggacccccttagctttcttcctacctcatcccaatgcataaacaaaggggctcaactattccggcacctctgcttctctctgagccagacaatttccctttccaaatcaatgccttccttttcattttttttttttttgtatatttttggcaaaaacctcctccgagcttcagctttccctcctgatctgcactttcagccaggtctatgtggactcaaatttgcatgcagcaattccctctgcaaccaacaagattttaattagtacccgatacataatttatagacagaaagcccttcgcccatgccagaagctgttttccaaactaacaagtatcgtttccagtcgaaaacattttgaagcaattaaaagttgtaacgaggctttcagagggcctaaagacaaagtttcacagcagtaaatacaaacataggggagagtgttctggggagagattgtcctcgggtggacctggctttggacctttctatttttctgctaaaaatggaaaggagaggcaaatttttagtttgaaaaacagattgcccgtgcaagtttctaaagtttacatagttattctcatgtccctttgatacaagagaaaattcactatactgtttcttccattatattgaagttcagtcatttagttcgcccccaggagcataaggaacaatttaaacagcaataattaaagtctgtctgatatgtttgaagtctctcaccatctgtggtcatcctcccctttgtgtagtcggtatgtagtccccatgataaatgtcaccccagaaatgagtcagcctataacgctaacactgagtctctaactcagcatacgaaagcatccaccatgccctgaccccatcatgtaatgtgttcagtgtaaaccaccatccatcttatgaaacaggccacttaagaagccacactggcgctgacacaaatgttctcccctggctcccggctcccccatgcagaaagctagcctttcagaacagcaacgtgtcacctttttcttcccaggtgaccttgtgttccaacaccgtgcagaaatacgagctggcgctggtggtagacgtggagggtatcggagaagaagtgctggcactcttaattacagccaggtagcatacatctgttcctctctgccagtgtcctcccttccccgtgggcccaggtcaggctgccccccacaaggcaattggcctgctaaacctgagtactggattcctcttgccttcctggggatgggaaatggaatcaggggtgcaaagggcaaagttttaaaacagagaatgtttataaaggacctctggccgagataccaaggaccaaaaggctttatgtgtgccccatactgctctctgatgagtctttcaaagtaaaggaactgaaaggattcatcagggaggtaacgagttgctaagttttattttgaggttttttttttttaatgtgatctatttcaaggtcaggtaggaaaaggtgctgctgtcagtctctaataatataaactcatcatcttcactctgtgtgtatgcacacagacaagcgtgtgtctgtgtgttgtacatgtatgtgtgtgcacatgagtgtagggaggcgcctgctccagtgtgcacatgtagagatcagagattgatcctgtgtgttctttccccgtcaatctccacctcattcttgaggcagggcctctcactgaacccagagctcaccagttttccctagagtagctgccgctggagcatccgagatccacttgtctctgccccgacacttgaagcttttatccgagtacaggagatcctaactcagctcttcacgcttgcacagcaagcactttatctacagctccgtctcccaggcacccagcttctccctctttttcagtgagtcagtcgggatccctgaagttaggtttaaagaggagctgcacgctttccacagcaaatggctgtggacagaaaggacacagcagagctggtgcatcattacctgggagttaggtcttaggagtcttagaaagacacaccttaaagaggatacagacatgctgattggtgggggtggggtggggtggggataataaccttgtgttggatgcttgaatgtagacagatatcagcctggaaggaactagacctcttgctgcctcagcctgcttaaatgtcactacaatccaactttgtcttgctgagaagaggaaaggctctttggttcagtctgtacctttgtgggctctgctttttgctttggctttgaccttgcacttgatttctgtactggctctttctggttctcttcagcctcctctccctgcagctattctgaattgtaaaataataataataatgcctaaaggggccatgagtttcctgctaaggtttgctgtgacccctgtaaaacatcgtccgccacctcggccacatgggcttgggaagcaaaggaatagctttgaggaagtcattgggtcaactagcaacttccatgccaactaaaaataagcattcatccctggtcagaaacagacctagggttaaagggagatccaaaagttatcatgtcctgtgtcgtctgtcggaactgcttgctgactcccaccagaagagcttctcttagaacttgtgcccaacagtacccgctcagaaagccagcagtgactagccgtgccctagccccaggctcatcccctctggctgtgcacttacaccctcctggctgcttcagccaccctaagagtaactaaacaatgtcatccaacctcctgaatgactttcacttttctcccgagagggtgagatgtgagacagaaagcaggtgactcaaagagacttaggctggactttgtgaggtcagcattaaactggactccacggaatttaaaaaaaaaaaaaaaagcagttctcttcctctttgtgctgcatgtcaggactgtgaggggcatagagcaggtgaaacactgagagcagagacgtggcatagaacccaagtcacccacagggctacacgcaaggagtgtgggcacagctccagtcctacgctgagctgcaggagacaacaactctgcacaggaattagaattgttattgttatttaaataatccaagctttgaccttggaggctttctaacccacccaagcagtacagccagttaagcctctgtgcaggtggccttggcctgatttttgacacagacgcaggcccactaccctaatgaacttagctatggggcccttcacaaaggaagaacacagtgaaaagaatcaatgggaagggttgttgctacacagcacaggcagctatttaaagaggtctacctctagttctttctgattaattaatggtaaatggggcctaaaagagagagagaacaggacagaagagtagaaacagttacttgttccccaggatgccccctcttattgttataagagaaaacccactatgtaacagttactgttgcatttagcttagctctccattttgaactgtttaatggactccttcgagcaggtgtgtggtccccaagctccagttggtgactacagaggtggactttgggcgctgcttcctgaagtacccatatgagaagaccatccagcttgtcaatcatgatgaccttcctggatgctataaggtcctgcctcaggtgggttactctgtccttcttccatgttgacctctcttcccgtggactccctcaatgaaaaagaggcatccctctgagaagctgtggtggccctgggcccatgacctcctgtgcttctgagttttaaccctcagacgattggggtgcaagcttagggagccacagctggattgctgtctgtgtgaccgagcagctgcaggtgtaaacgattgttaatttcccaaggaaattgtccttgataaagaagagaaagtgtcaattaaaccaacatgcagaagtgcacctgcagataattgcctgtgaattaagcatgcttgggaaatgagctgggagatctcacttgtacccatggccagggttgaacagcatcaccaaaatacggtgatgaaaagtttataaatgaaccctttggaccagaaatctagaggttacagagaaagagagactgtgtcttaattcccatgaaatacacccccttccacacatcacacctggcaatgtgggggacctaacaggtcacatgtgcagaaaattcagaaatatttatatattatttatatatttataatatttaaatatttatatagagcaatggaaggtcactaatgacatatgatttacaaagaatgcatttgggcttcaactttgggtctgtgcgtatagactacaatataaactcatgaggggtggggtagaggtaaggagtaatttggatgtttagttactttcctgttgctatgataagatatgacacaaaagagcttatagaagaaatagtttattctgacttgtagaagaaataggttaggggcccatgatgacaggaaggcatggcaacaatcaaatgtagcaagaagttagttgagtacatttcaacatgcagatagcagagagggcaaactggagtggagggggctacaacccctcagttgtgtacttcttcaagcaaggttgcacatcctacaataacacaaccaactagggaccaagtgttcccatacctgagctgacaggtaacatcattcaaaccactacagaggtttatttggtcccaagtcaagtgttttgtggggacacagaataaagatttgggctgcatctgagaaatacagccaaggaagatggtagccactggtcaaaacatgaccagacgcttctcttcagctcttgtcatcttttgtaatgaaaacttggaagggggaggggcagtatgtttggagtaaccaaaatgtggcccatgtcatctccaaacctaagtcttgagaagcgccaactcaggcgtttaaaatgaacaaagaaggctaagccaggaccagatggccacctctcactagccaaagggatattacaaaggagaggaagttgaaattattatgtgggcttctcttgacataagcagaaatcaggaaccaagctacagaacacatctaacacatactcaggagcagaagagagggccctgcaatgtgcatggtcatctcaagaactcagagcagagcctgcatccagggataggggaagtatgttcaacatatgggagctgggaacctgccttgggtgaattattgaaggggaagcttgcatcaagatacttagtattttttcaccacatgttctaagatattaaaataatttttaaaaactatagtggataaaatatcagtatctggataaaaggtcacattatagaccttttcccttttgtctcaggctccagagggctcagccaaggagtgatatagaatgatagagcgttgtgaagctatgttaggccaggccagatgcagaaagggtagggatgttccagaagggtgaaagccataggctgtgccttgctgctgggacctaaggccctcaggaaggttttcagaattacccccaacctacagtgtcagctttgggccagaaagtgaacttggaaaaaggagaagccaggctccaaaatctatccattgggcatgcaggtggacacatgcagtagaaaaggacttcactggatgccctcggagcaagccaccccctgaagctttccgggggtgggtgtgggggtaactagagcaaattcaagaaaaaagtgtctgtggcaggtcaaggagaacagcgggctaagaaggggatcacaagagtaaaggactgcaggtggggcggggaccgcgtgttcagaaagtgctggcggcatgacctgcattaatggagtgcagaggtctaaggcagtgggaaatgaagcatgaaggcaccaaggacccagctgtagaccttggtcatgaatggtgattgtcctgaatgcctgctgtgctcactccctgcatcccactcttctaggagcctgggatttttccccccacactccacttaacctaatgtcctattggctgaatcaaggtctttgtcccataggcttctctaaatgatgagatattcctaataactctccatggactctgaacaacacttgcttcaaaataaaccattatggcgtttgttctcctctaagcatggcttgtctcccctggtttgtttctctgcagctgtatgagaattcaccccctgtgctgctctccagcccctccccctgtggggtcatctccccccacagcactgtgagcataccactagccttggagacacaggtcattggcgcacatcgatccatagtttacatctccgtctttgggagccaggaagcccctctggtgagtcagttttcagaatcgccatcaaggtcacatgctccctaccatagaggcttttagcttcttccttggaggggtgcgtcgttatcgtgtatcatttggtttttacagttacaaggctttatgttttcattctgcagaagtaaaacatgtgtgttatattacctgaagaaactgtatgcagatgcatccagaagttgtgaggtagtataggaaggaattgtccttaagcctaacttgagtagcactattttcatatgcatatttcatattcatgcacacacacacatgcacatgcacacacaaacacaaacacaacacatgtatacatggttggtgcctctccatggtcagcatatctgtatgttcaacaagctcctagttgttccaagagcaaagctaagcttggccatcactcggtcacctacaggctgttcctcagatcttctcctgtagagcaactacatcaacagtcacccaagtttacctactggagctgttaagcgtctctccaggcaaggtaggggaaaaccactgaaaactgctgcttaggctgaactgataaatcttaagtcttaatggagtttgttttcctgggtattcagtttccttggaagctggttagtgtcagttgagtggattctgatgagctacggagcacaatgagctcagtgtttgctttgacctcttctgtgtaagatgctataggcgatcaacagcaggccagcatctcccgcatggctcactgtgaccaccccccctcacactctgcacacatactattggtgaagaaggcagctagtgctttaggaaagaaaaggacccgtgcagttcaaagtgtgaatttcagccaccaacctgtgtgatagctttgcctgtcagccgttaccggaatggaaaagctgggtattaaattcagatatatcacagcaacacataacttcaggtgttctcgagaacagatggctgaatgggacagacagctcccaggatctgattttctctactctgtgacctgggctggcccagggaagctgatcaccccagggaggtgtgccaggctagacaaacaggtctgaccacacgtgttcatctctgtgtccctctgaccacagagaaccagcgggaagggatgtgagctcataccagcacccttacctggtcctttgttcttcctcttttggaatgcaggcatgtaacatacagagtattggagaaggccccgtgatcttcatacatcccactcaaatcgactttggcaatatctacgtcctgaaggacacctccagaattctccagctctctaaccagtccttcatccctgcagtatttcgggttcgcatggtgagtaagtcctgggctatcacagctttggcttgtgtccagtgtccctatttttagcaacatgtgtttaaaaatgagttgccagagcagagattctcatggctaagcagtaggaaactgtgtggctcccatccttagttctctttattatagtccttttgttaaccaagaagcacaatatacatatttggtaagcaagcagatacagttcatataattccatttgggaagatgtttgagaagcaaccagctgtagctctcactgaagacattagctccaagccctctgaagaacattgtctctttgattcctgttggatatacatttcttagtttgctttttgtttgttggttcgtttgatggtttagttttgtttggttttgttcttccctttcttcagagactatttcaatgcaatttataaggatgtatcaaggccagagagatggttacacagtttagagtccttgctgaacttagttctcagtacctatattggatggctaactccagctccaagtgatccagcacccccttttggcctccacaggcaattgcactcatgaatacacatacacacagaaacacgcaaattaaaaataaaataattctcataaggacggatcacacataagatactatatgccaaaaatggaaattaaagaaaacaacaaggcaaggtatatatgttaaaatgagtctgtctcagacctgcataactcatgagtatgatttagatctgctagccacaataagcccttatttatttacttatttaatttatttgttcaaaaaagagataatattgggttggtttggggaggtatggcacacatttttttaacttgggtatttgttatgttggttgggttttttgcttgtttgtttgcttgtcaaatttaggaatatttctactctagtcattaaaagtgccattaactttaaaactggttttccaaatttaaacataaaattataaccggtattattgtcttcctatctctgaattattgtcatctggttaggagctgtcaatttttctgaaaaatcaaatattattattttcatagcaatcactattgaaaggaatagaattaacactttctcctgactcaaaacagctcaccagacattggtcccaattagcagcctttattcctcatcctgattcatctttatcatcattttccttattcttcatcaagccacggtcatatagagacattcattgctcttttccttttttaaaaattttttttcaatttttattagatattttcttcatttacatttcaaatgctatcccgaaagtcccatataccctccccccaccctgctcccctacccacccactaccacttcttggccctggcattcccctgtactggggcatataaagtttgcaagaccaagggggcctctcttcccattgatggccaactaggccatattctgctacatatgcagctagagacccaagctcaaaattatggaacgcttcacggatttgcgtgtcatccttgtgcaggggccatgctaatcttctctgtattgttccaattttagtatatgtgctgccgaagcgagcactcactgctcttttcaacatgagggcccaacatctagattttttttttgtctagagaacattatttaataattgatagaagaaagtcctgtcgagaaaaaaaaatgtactattgacattcatggctgcacttggtagaaattgtgaagtcttgcctaggaaatgttgctttgtggtccagtatgaaattggccctaggaaaagaaaggagtcagtgaccctcattgagaacctaggggactcagctaggcctggggacaacagagggaagacacaggcaacccagagaacctccaaacacacattgcagctgttccctcccactcacaaatctctatgttttacttttcttttcaaaaagttttatttttactgttgctgctgctgctggtggtggtgatgatggtgatggggggggtgttgttactgatgatgatactggtgatggtggtggtggtgatgatgatggtggggggtggggggttgctgctgctgctactcctactggtgatggtggtggtgatagtggtgttagtggaggctgtggtagtgatggggatagtggtggggtggtgatgatggtggtggtggagatatgtgcactgcatatgcatgcaaatacctgaagaaactagaagagaacagcaggtccctggagctagagttataggtagttatgagccaacccaatgtgggtgctgggaactcaggtcctttgcaagaatagcatatgctgttacccatacagccatccctctatcccccagatttcacttttaatggcaatttttgatatatttcaaaacacagaaagtatatcaaggatctttttattaatatggagtatacagtgaatggtccagctggcttactaaaacagtgcttttcttccttcccacaaagatttttatgatcccatgtcccaacatagatatttccttacatcagagccacgcatgtaacacaagcaatacactgctggctgtgtttggcctccatctgctcctggagtgttggtggagtttaggcaagtgtgaaatagtctccactgaagttatcttagttgaaaactgaattccttttatgtggtagctggggttttgtgaatttcctgataaatatgcattaatgttatagaaaccgaatttgtaggctgccaagcattagggacgagtcttgacgaatgctcacttgctctctcaccaagcctgccacagatccagagccccacagcctcttcttgctggctatcctgatagaaggggtcattctctctcctctcttggctgtcagaaaacgccatccttccccagatgctccctgccgtcagcagtctgctgcaatctgtatcatgcagggccacatgcatcacggtcaccactgtgatcaaagtctcccttagcaagaaacatacagctgaaggggccagaagacaggaagtggaaagctctccctcaaggtgatgtcaggaactttaaagacagtttaaagtttaatgtcttaaaaatacatactagattttaaaaagagataaaaatgagacctcttttaaaagtttagaataaaagaacatatgcatggtatatgtgtatatatgtatagatctgtaaaattttaacttatccttagttaatgtcccatgaatggatctctatttctttagagtaaattgtgtattggttttatttctgttgctaaaatccccaggaaaagcaatttgaggggagtgtggtggtttgaatatgtttggcccatgggaagtggcattattaggaagtgtggccttgttggagtaggagtggccttgttggagtaggagtggccttgttggggtgggtgtggccttgttggagtgggtgtggctttgttggagtaagtatgtccctgtggaggtctcctatatatgctcaagcctggccagtagaatcagagccttctcttggctgcctgaggaagagagtctcctcctggctgcctgtggatcaagatatagaactcttggcctctccagcaccatgtctgcctgtccatgcttcccaccatgatgacattaggctaaacctctgaaactgtaagccagccccaattaaatgtttacctttatgagagatgccatggtcatggtgtctcttcacagcaatgaaaccttaactaagtcagggagaaaggatttcttctggaaagtccaccatggtgagaaagacttgataacaggcagggagcacacagcaacaggagcagccagctgcctgatcacatcatatagcacacaggaatcagaggatttgatggcaaggctataaaacatcctccagtaagactccgcttcctaaagattccataaccttcccaaagaccagtatcagctcaggtgttcaaacacaggagtatgtggggcacactgaatgttcaaaacacaactcttggaataccacacacacacacatatatctagagggcagccagggaggagtcttatttggggcaacagactagaataaattgcttcaggttttgaagaataaaatgttctgaaatgtaagaatctcaagtataggaaggctctttggacaggatgtaggttgtcctgacagagctaggtcaggaacacagagtctctgttcacttggagtagcagaaatgaagtgggcctgggaaagcatcctcaggagcctgaggtcatcagcacgaatccggaggacacatgcgatctcttcatgggtgtccctggctgggcagacaaggacatggcttagcacttgcttggaagcatctggaatcctttttcttacacccccgatactaatttggccctgaccacagttagcgcaaagccttctgttcagatttcagtaagaccttgggagtcagctggcactgagatagatgtctttgcagcggcctcttgcctccgtgactcaagtgagaagccactgtggtttgatatttagaattcctggagcccaggaaaggaaattctgatgcttcatccaagcatggttgtttttgttggctgtgcattgagccacacggtgacacagcagaggggaccctggtgttcacatctcagacttccaggccctgggacactccctcacctctacagggtcagcttttcttctcttatctctttgtatatctgtctcattccattgataacagtctctgcacttcatttccagcacctagcaacaggtgtggtagtcatgatggtgacagtaaaatgaagtccactgtgacaaatggttgtttatttatggcccctattgtatagatacaatacaaacctatggtgatcaccataatatagcataaacagtgataaggactggttaacttactgtggagtaagtggcaacctagcactgtgcctggtggtttgatcccagaaacacgaccttctttcctggttctgtactgttgaactttacctgaccagtcagtgggcatcaaaatggcagaaggattttgatttatattaagtaagagaatggacattatcctggacaatgctatttccttgctctctgctcaaagacaaaccatgtaatgaatttaatgtgaacccaagtcgtgcttttatattaatacataatatctgtaagtattatatctaagtcgagttactgcatgtgacaccttgtaacttactgttcacactcggtgctgtgttccaaaacccacccacgtttatgcacacgtgtctgtctgctcagctcagctgctgcatgtattcagcttactggcattatggctatcttctttgacaattgggttagtgtaacagcagcatgaaatccttgtccctctgtaaatgcaagtgataatgtggagtttatgcagcgcggacaaatacctaggtgtagagttgttgagtccaaagcaattttatcaaacagtgtgcccttccggaagtgcttgagctttctctccaagacctaaaacgcagtgcagccagattcctaagctcttgccagcgtgaacgtgaaatagcatccatgaagaaagtgacttgtcctttcactgatgagtaaatatgagtctttctcatgacctggccatgttgaggcaccagggcaggctgccgagagattgaagaaactgcagggatggcttgaatgacacatgaaatggattcgaagctactgacagagaagagtagtaggaacacaggaacactcacagagaaagtcaaaagccacaactgaccatgtagacagcaggtctcccagggtgctgcactagagtcccacacattagcatcccattcgctgtccccttctgccctccccgttcacctcccccccccacttctaccctccccctttgccacccccttctgtccaccccactctcttcccccagcacacttctgccctccccatacgccgccccccccccgccccatctgccctccccattcctttcctgtctgtctggggacacagccacactgtggttctgagattctctactcagcttttctgtgactgtgaaacacctctaaactttgttgattggaaaggttcatttgctaatttctgctgctaaccttatgttcttccacttcgtttctttaccaccattttgctctttttcaagcaccttcatctgaactagcgtcactttcttcttcaatctgacagggcaccagagtttgtcagtgtttgctttacatggcacgtgatacatatagtgtcatgcatgttcttattttcagtgtttgttattctaagtctgagagggttgttatggttttctctttgtgaattacatacaggtctgtagttttaactcttaacagttttcctccttaagaacgttaattagattaaagttagaacacacggcttgaatagcacaactctaaatatggtctttgggagacagcttgtggttagtttttatagctactccatatgaccccaggacaattatagattacctaattattaagtgcactggactatctattaagtatttgtattatcaactcaatatcattaaatatattgttcatatctcctacagtattaccatttgcccaaattctgataggacttcattaaaggctctctcttttcgtttccctagcatcaattttcaccccatgtatttcaaagccaagtgatgaattttattattatccctattattcctctttcatagtaattattcattctaatttctgtttatcatttctgggttaaattctatttttcctgagaataattttaattgctatctacctggtatatctttttattcttttaacttcattttgtgatttatttagaataataattctaaatagtatagatttgagtttttaacttttgtgtgtgtctgtgtgtgtgtgtgtgagagagagagagagagaaagagagagagagagagagagagagagatgtgtgcaggtatcagagtccctggagctgagttacaggcagctgtgagccacacattgagggtactgggaaccaaacctaggtcttctcaagggcggcagggctcttcaccactgaaccaactctccagccctgagttggattcctagctagccaataatagactctgcatttaaatcagaaagcatattaatgccctgttgctgatggaatgaatttgttaattaacagttccagaggtcatggtctaaataaggcttagttccctttgagactttaggagagaatgtgttttcctgtcacctggaaaacttcctcatggtcccttcctccatctccagagccagcagcatctaagtctctctctctctctctctctctctctctctctctctctctctcctttgcatctctttctggttctgctccttctgtgtctctcttaaaggatatatatatatatatatatatatatatatatatatatacacacacacacacacacaagcaggcttatttggatagtgtgattgttatgaaactgatattgaattatacaaacaccaaagaggcaaagacaatccatgagtttttagaatattacttaagcagtacagagagtccagtggacaggagcaaacacattccttgatgacagctttattctaaattctgacgcaactatactttaacacttagtttaagtcctcggtgtctgactagtcaagtggaggttattataacttcttattttatttttaatttattttttacactccatattccgttccctgccccccatccaccctcctactgctccacatcccgcagctcctcccacctcaccccatctccacgtggattgcacagagccagaccaatagtccaggttagtctctttatctccaggctggtaatcactctcttttgataacacttcatagacattaaagcttaagaactggacattgccgggtttggtggcgcacgcctttgatcccagcacttgggaggcagaagcaggcaaatttctgagtttgaagccagcctggtctacagagtgagttccaggacagccagggctacacagagaaaccctgtctcaaaaaaccaaaagaaaaaaaaaaaaaaagaactggacattttgtgaagaccattgtccaaccttcgacacccaaactaatagtttacaacggaccatgtctacggttgtctctctcccttctcattctcactctgcactgggctttgctttcaccatgtgaccccccccccaaaaaaaacataacaaaacactaccactctgtatcccatttccttggatttatctggacactgtagacatagcatattcatgtcattctttaagtggccacacttactttctcagcaaatcaactctctctctaacaacaatgaacagacttagtatttggtcttcctcaagagtaaggacagtctgcacagccactgtacggtgacctttttgtgacctcgttgttctttacattttgtgtagaccatgaatcctctcttcttgaccatgggaatttcgacttttgtcaggctgtgattaaccattcactgtatatgaatgtagctccctgatggcctgcccctcttgtattctgtgtcatttcaccttttcttcccatgctgtgttttgtatggccgattggtttggcttggcgtggcttgcttggtttagcttgaggtagggtctcttgccccggctgattgagttcttgttagcacaaacaggtttcacacctcattctcccaagctgcagttactgtagatcagcaccattcagcccagcctagtttgtctttctcttcgaaaagttacagctttctaaattcttcaatagctcctccttccgttcgtcgggttcttccggtccttcctctgaaggttgcgcctttgccttactgatgctggtcatttctgtcagttgcataattgttcattcaagagcaacttgtcattttttaactccttgattttaaaacttttttaatcctttaattttcttaaatttctgattcatgtatgagaagatttgaggattaaaatctggaaagtgtttctttgctgctgcttctgtttcctgcttgtctcggggtttctgttgcattgacaaaacaccacaaccaaaagcaacttggggaggaaagggtttattcagcttaggcttccatatcattgttcattattgaaggaagtcaggacaggaactcaaacggggcaggagcctggaagcaggagctgaggcagaggccatggagggatgctgcttactggcttgtccacatggcttgctcagcctactctcttgtagaacccaggaccaccagctcaggaatggcaccactacaatggtctgggctcttccccattgatcacttattgagaaactgccctacagttggatctcatgggctcctttctctctgatgagtctagcttgtgtcaagttgatatactaaccagtcagtacactacttaaagaaaaaaaaaaaccacatctgcacacacacccatacatataacccacacacacatacatatacacacacacacacacacacacaaaaatatatacataccttcacatataacccatatacacatatactcacacacttatacatacaaacacacatacatatacacatatacccacacacatgtacacacatatacatgcactcatagatatacacacatattcatatacacacatgtacacacacatacacatgaatgtttctaggattttccttgtactgttctacatagatattcttattttacttcttgctcatccttcctcctttgtctcagtggtatgctctaaattacaaagtctggctttggtttttggcaaatctgagacttaacccatctttagtgactgtatttttcacttccaagatttataactggttatttataagtgcttgttcccgagtccaatctccctgtcctcatttcacaggctttgttttggttgtattaccccattctgcagctctctgaggagctcagaggtactttctaatcaatctcagctggcactattgattgttcaagagcaaatcaattgcctgattgtctgcagctgttcttccagatgttcggcattttaaatagtcagtctggcatgggtacatatgtgcctcattcttagtgcacaactcacgcctccctttctggcagtctcacatttaccttcactctggacagtgatcagcagcctagaatcaagtcttgtgcctgccttcccgcaagatactggaaaagtcagtttccagttgttgtgtgactggtgacctgtccaacaatcagcttgcccaacagtcaaccttcccaacagtcagtctgtccagcagtcaacctgtccaacagtcaaccttcagtcagcctgtccaacagtcaacctgcccaacagtcagtctgtccagcagtcagcctgcctaacagttggcctgcctgacagtcaaccttcccaaaagtcaacctgcccaacagtcagtctgtccagcagtcaacctacctaacagctggcctgcctgacagtcagcctgtccaacagtcaacctgcccaacagtcagtctgtccagcagtcaacctgcctaacagttggcctgcctgacagtcagcctgtccaacagtcaacctgtccaacagtcagcttgcccaatagtcagcctgcccaatagcctgcccaacagtcggcctgcccaacagtcagccctcccaacaatcagtctagccaacagtctccacttcactccccctccaccaggccacatgcatgtgtagactgcagcttcaggaacattacagcctttttgtcactcacagagaagctgccttgcctagagacctcagcccgcatcccattctgtgtttttcagtttctagttttctccttcaatctgcctctactaatgttcagtgtcgagagcctggtagatccatgactctcaagccctcattgtttctgtttcatgtgtgactcatatgtttatcttgattttgaatatagctatgcttagcacctttttttcccaaaaactttatctcattttctgataggctaaagtgaaataaatgttttaaatcttaaactcattagctgacagactgtcctcttgtgttttagccctttgtaggtgctaatacacaatccatttcaagagaatagtagaatatgtcttcaatggaaataagaaagaagaggagttgggggcactgggttttttggttgtattttatttggttggtcttgactttatttgtgaaaatctattttttaataaaaacactaggagccaggcagtgctggcacatgcctgtaatcccagcttgggagacagaagcaggtggatttctgagtttgaggccagcctggtctacagagtaagttccaggacagtcggagctacacagaaaccctgtctggaaaaaaaaaacaaaaacaaaaacaaaacaaaacaaaacaaactaggaataaagagtcaggaaaaaaaatgagtttctaacctatgatgaggactatctcttttttcttcttttttttttttttttttttttttttttttttttttttttttggtacatgaacatccgtcatgatcattccaagatgagttgggctcctcctgagccatcatccccaagtgacaagagggtcccagtggccataagatcgagagttctaggagcaaagatttgagcttcatagagaacttctcatcccccacccgcaccccattccaacctgagacctagttcactttctcaaaactgaaagtggaagacagaagtcagagtccagcaggtcccactgatgatctaaaccacactgacaggaggaaacgattgattaggcatcaggtaacgtgttgggtcagcacttctctgagcctaggatgacaaggctaccagtcaaattcgattagtttgagtataagttaaatccgaaatgaacggagagcatttgcaaatgaaagggagttgtccaaaaaaaaatacatctttgttggcagccttgtccagctccattctacttgtcctgactcttaattggttttggaaaattgctttttctactaattgctattcaggtgtgcagatgtagtagctatcatccagaggaagtatgaagtcaggtttttttccctcccttatatcaccatttccttctctgtgaaaaggtttagcttcttcctggtaatcagcagcagccacccaactcatgtcacgtttgagagatgacctttgctgtccctgtcagctgaagcactcacccctctcgttctgtgtactgatgctaaaccgccacagttcaatgcagagttggtaacaaaacgaaattagcacctgtctgtaatcaagaacaattacaaggttcaaggtgtgctgcggactcctcagcggatcttcatcggagagaaagtcaccctcttccttagttcctcttcctgtcctctgtcatgagcaagaacacagagactaaacagatgtggtgtttgccatggcagaattgtctgcgggagtccacttggaatatatcttttgtaaagagtagctgtactgatattgctgtattcacactaaatcacatgctttagaagacaaaagaaacctgtctctgtgagattgcacattaaatccctttgcatctggcagggaagacactacctaggggtggcagggtcacgccccaagcacagctgctcgaagcatctctcatctcggtcactcagaagagctgtagagggtccacgttgaggaaccaatcctaattcttcacatgctggctatattatttaaccctttccaccctgtggttcttcttttgatgtaacgagggcagtgctatctagaacgttgtgcaggatgattacagaggaagcacctgctgaaaagttaagaatttggtaaatggtagctttaattgctatctgacaaaaagggccaggggaaacagcacgtggaaagatattttctggtaactgtatccaaaggtcttgttccaactccttaccggcaggcccaggcgagaagagagaggtcccgatcccacccgggtgtctctggggctgagaggaatggcgagtgtcaacagcccaaaagaaacacaccgagccgagagtcttgttgaagcaggaattcaactttatggcatcagcctctcaattatttaagttcagaacatagggagagggatttttggcggggtgagatgatataggagacagggaagggtgatagcgggtatagagtgactgacagggccaatggcaaagctctacatcagcaatggcagggcagaggcagggccaaacaagtcttgctgagtcacctcaacatgaaagtgaccgagacaggtctcaaaacatgagccaaccttgggtttgtcctgaaggcccaaaccagggccaaaatggagcccaacagtcttgtttttgtcttaataataagaggagaaggagctggagaaggaggaagaggaggaggatgacatagtggtggcggcagtcatagtgagggacagcaaaagaagccctaaagttgcgagtcagctctgatgtcatgcagcactctggagaacagaggctctaatgctgccttgtcctcacttttctcccatttctctaaatttttgagagaggagtcctcttgtgagaggctttggagcatcagcattggtgggcaagcatcctctcacggcagaggacggagggaaacagacttcttagcagacagctcttcagaaatgatgtctttcactcaggacatccttacttgaacagctgccccagaaccatgcaaatttgtgtgtgtgtgtgtgtgtgtgtgtgtgtgtatgtgtggtgtgtgtgtgtgtgtgtatgtgtggtgtgtgtgtgtgtgtgtttggtgtgtgtgtgtgtgtgatgtgtgtgtgtgtatgtgtgtggtgtgtgtgtgtgtgtttggtgtgtgtgtgtgtgatgtgtgtgtgtatgtggtgtgtgtgtgtgtgtgtgtgtgtttggtgtgtgtgtgtgtgatgtgtgtgtgtgtgtatgtgtggtgtgtgtgtgtttggtgtgtgtgtgtgtgtgtgtgtgtatgtggtgtgtgtgtgtgtgtgtttggtgtgtgtgtgtgtgatgtctgtgtgtgtgtgtttggtgtgtgtgtgtggtgtgtgtgtgtgtatggtgtgtgtgtgtggtgtgtgtgtgtgtatggtgtttgtgtgtgtgtgtgtgtgtggtgtgtgatgtgtgcggtgtgtgtgtgtgtgtgtgtgatgtgtgtatgtgtttgtgtggtgtgtgtgtgtgtgtatgtgtggtgtgtgtgtgtgtatatgtgtggtgtgtgtgcacgtgcgtgcacttgtacactcaggagctatcctgtttgcttgcatgtacttctctgtgtgctgtgtgttcaagctgacacctttcaccaagtctttaaaaggaggagccattcaagaacagtgtggtcagcctctctctaacagattactggtccgtattacttgagaacaatgaaaatggcatatactcagtcccttagtacaaagtcaattggccctataattctcacagtcttccccctccacaagcatgcagagccacgacttgagtgacaggaaatctctcatcggcaaccaaatctctcctattttgtctatacagagaaaagcccaacaaaataagtacatcatgtatggggagcgagggagcaaccaacgcagtcacaacacaaaatagaaaaggaaagcaagagaaacatctacatccggccctgcaattgagtctaggagaggttggaaggtttgaaggagctttcaaaagacttacggtctagtgagatacatttttgaacaatagtggaccacagatataaacactgatagaattaaaaaccagtcagattcctaggctgtgtgttgggcgttgatctgcttgccctgacttccctcagtgaaggactgtgagctcaggataggtgcctgggggtgggggatgcggcgattagtctctgagaaataaaactgatggaccatttaagagcccatccccacccttggatgtacatctgtaggaaaagcctgtgcttgctacatcagaagcctaagtgaagaaagggggctgctcctaggaagatgaatactggattcaaaagacccatagctcagctgtgagcaacgtttgtttggtctaagtgcaaaaaaaaaaaaaaaaatgtttttttctccccatgaaatcatcccagcttggaggatggagagaagaaagtgagagagaagcgtgtagagctgttctcagcctcacagagcgagcgaactacagggtgctcccatatcacccccaatggatctcaagacagggactgagagccgatgacctaagaactggccgggctgcctgtggccaagaattggggtaactaggcaaggtgggaaagaggactcagaggactagttttttcttaccgtacactttctctagaaccatttgtctcaccacgtatgtctgtgtatacatatgataagaacagaaacaaagccccacccccatgacacagaaaatactatatatgtgatgtggcaccatttataaagtcagtgtttggatacaaacaaaagggggttttctttcagtcaaaaaataaatctgcaaagacacagaaaattactaatgatggctacctctgcggatgatggccaggaacttcctgtgtgtaaaggtagagaggaaggaaggagggagaatgagctctccagagaaaggatgctggggaatggcttggtggtaaagcatggatgtagcaggtacaaggccctgggtgcaagccccagctctgtaaactggagaggcagagaaagagaattactatatcacttttaggagacacttgttcactggagtgagtgtgcaccacccttgtcctgcccttccacaaattgcttccttctagaacagctaaagatggggaggggaccattcatcaccccaccatgcaggtgacgaccgctaaactttgggtgtttactctccagcatttcccccctcaggcctatgttctcccttccctcaccctgtgaggtaacttttgttgccagctcttttcatgtccgacatatcagcatcagtcagaaattttgtaccagtttatagccagcccctggccagatgtaaagcgtgatactccctcgcatgctcttaggaacgctgtcactgtggccaaacccaacagatctgcttttaatgttcattctaagtttgcatttctttggtcttccaaagactatctagtgagacaggacatttttttcatgtacctgttgaccgtgaagtagatattatttttgagccttgacccattgctggcactctgatgaccaaggggagaaacaaaccagaaatagaaaggctcatttcttcagaattcacaattgcacagaagaagctggccagcaacacagccagatggtacaatgtaagcttggaggaggaagtggccagttcttctaccaaagggaagcctgttgccagtcagaagaatggaccagaagcttcaaggctagacaccaggaaggcaaaactgggcatgcatttatatataatgactgtgcttggtttatttaggatagcaggtgaccttctgcttcatgcaggaagtctagaaaaggcattggggacctcttagtagagctgggactaatctccagaccagaggtcatgtgtaggataccaatcctgatggcaggtcgccatgtttgcagagggcctgggtgttgtctcagaaggacctgaggtcccactaagatcactccaaaccctaagttcccaatcataaagtgggaggtggggtagggggagggcttagacatgaaccaaacagaacaaaattatgacaaaactcaaccacatttgcagtttgtgtactccgaggcttgtatgaaaagcttttgagtgaattggggtaattttatggaggagatacatagatgtctaaagggggctcaggagaccgatccagacaggctcaggtctgtataatatagcactctcggtgacatggattagaaagtgacacgagtaaagctctctgcttcttgagtggacaaggtgggagacagcacccatttcatccagcacaatgtggcagcatacacctagagtcctcagtgtatgtcggggggcggggacgggacgggacgtgttcctcgacacagagagagagcgagccctggttccaaaagaaaaagagaaagcacagttaacagatggagaacctgtaacctagactgtaaaatcagcccaaggtcacccagctgcagatgacagacttcaggattggccactaagccgcgtgactccacagcccacacttccagtcatgaccctacacgtcctcccttggaaagcctagcatcagtccttctgcatctccctcttaacccccagttaattgttaaaagcagcaaaatgactcacttcaagggagaggggtctatgactccagatgccatttagatgatgaaaagggggtggtggccctcagtgagactccattgttcttgccccacggagaaaggactgtctgctgagataatagaagtctaccacagtcccttgatccacacgtgggttcctgttgttctctgcttccccttacttcatgggaggaaacctcacgggtctcaaatggcaaaggagctgttctccagctcacagtgttattttctacaggcgtcatagtcattagctctgcataacagcaggcccgccaaagcatgtattgccaaagtgacatgtgcaaacaatagcaaccacttctgccttttatggaaaaatattaaacacatgataaggaaacttatttttaaaagccctgtctgatttaccttgggagccgaacctacatactacatagctcagggatatagcccatcttcacagatcaaaggcaaatgttaacattaggtatgtgggacctcgcaaggagggctcatccctaatcaccagagggcatggaattctgaactgtaaaccatcacaaatcctccatccttcccacagccaccacacacacttgcacataagcatgcagttcctatatatgctagctatgggctgtggaaatggctgactcccaagccctaatttgctggagaaatacaaacaaacaaacaaacaaacaaacaatcaaacaaaaaacagagacagccattagtgtctagtttttataagattattttttatttgtgtatgtgtttggggtagaggatgccttcagggaccagaaggtgtcaggcccatggatctagagttgaaggcgatttgtgagctgccagatgtgagggctaggatcggaactccatactccgtgagagcacaagcccatgcccttgcatagtatttgttcgtctaggactgtacttatcacacactagtcataagcactccgcttatactgaccacttaaccacagagccagctccccagctccaactgaagtcttaatgggaaactctgtagagagagggcttgctctcagcatctttgaaagaaatgtatggaagctcatattcaccttctattgctaggtttcaaattctcataaacctactactggtttaaaacattagtaatttgttatctgttcttatgtgtgaagaatccaggcgtggcttcctgctcatggggtcaccgagggctgggataagtacgttagccgacctacatttcttgggggtggaggggccgctggctggggtggattctccctctgaccagtggtggaggaagggtcctcagaggaaggagccacagcttggatccctactttgctggcagacttttgcttgcagttgaatggctgacagaactctccagtctcactcgttatcagcatgggctgctctcaatagttaccgggccaccatagctaccctattacgcggccattccttaacgtctctcaggctcaacatttctgtggtaagaagggttccgtctcctttgggcctactgaagaagatctcccatctgaaggtgaactgttttaggactttaactgcatctgcaaaatcccttcccgggaccaccaacatcagcatttgactgactaacagagacggtaactgtgccccccaggagatggacatcttagggtccatcttagaattctttcaaccacaagtctccacaaacactcctttctggtaagaatcttaaatcttcaattctttcttagaatccatctttattttcccaatgtcaaatctactttttttttcctagcaaaaccactattaagcccatacttgtgagagcagctcagatttgagtaaaataacaggcgtaatcgtggtttttggtaacttacattgcacacacatggctgcggttaaccatcaccaccacctcacgtgggaggcacagtcagaactcagaactaattaggtcgataggctacatgggtgatgtcttagttactttgctattgctattttatcagcataatccatgcagtttgtaggagaaaaatggtttagttggcttacaattctgtagggttaacagtctgtgggagtagactacaagctcacatcttaaaccacaaagctgaagttaagagaatcttttgaatccttaaagcctgctgccagcaagaccagccctcctaatcctccccaaacagccaactgggtaggagccacgtgttcaaatactcaattcttatgggtagggggatctcatttaaaccacaggtgacaggtgacagtcctcaagcccaacacctagagaccagctaagcaggggactcaagcccacatctgttttccctcagagccttccttcctaacctttctccatccattgctgtcttactgtaccggggtcttttgttaacctactttccctcctccaacagaaaatgcctcgatgactagacccgcccataaatgcaagggcacccttgaaagtcaagcatcagactacacaggcacatcagaccactctgacttagccttgagagcggcccaggatcttagcagctggcactttgactgtaccttgtccttagattctgtgatgtattttgctgtctggttttatgccaggcattgattaataagcttcatcaaaaagaaaactcactgattcagccctggaaagcaacttcagtcttgctcccagagcctccaatccatgtcagcaggaatcgaatagagacggcatacatccatcgaaaactgatgtcccctgacctgaaatagcactcccaccggccacagcctcacctccttgtgtgtagtgtggtcagaggaggaatataaatagtcagagtgagccaaatgactttgacagtaccctctctgagaactgccctcgctttttgattcttctttttttttttaatggcagtgatttatgtctgcattgtaagccaagtctcaagatgagcaaaactatatagaatgctttaaagccacaaattgggaagagaggtcagcagagtaaaattttttcacccagcactttcttatcttctcccaccccccacccccgcccacggttctcaggtttgaattgccaagtcagtctctcactggagccctttacctttccagtcctgagatttgagagaacttggaactggtggcacacctgcacgcagtggccatggtctaaactaacaaagtgcttttatcaatagctccccacattcgtctccctttgctgaggacccagacctggactacatttcccagactcctcctaggttaggtgtggctgtacatgggagttccagccagcggaagtgggcagaagagatgtgcacttgccttcttggtatatgaatcctggcatccaagcctccctcctgctggtgttgctatctagtgatttgccaatggctggagtgtccaaatgtgtcacaattggctcagctgaggtgtgtgtatggagtgactgcgtagaatagaagccagtcctcatctctgtcccaccttggaaacaagctaatactgtgtcaacccgctgagccttgggggtctgttatagcagctaccaattccttatctaaaaagtagccatccagaatctcaaaattggaactttaaaaacgccaagagaggagaaggactgcttagcccaggatgaaatattcatttccatctattgctttaactgtgtaggtcacgctggaatgatctcattcaaaggcttcattcaacctccagaaacaaagccacctcggtccgtttttaaatggctatagacggtggaatttgcatttatagttctttgggaactcactttgatgccatctttgtgatttatgtcttagaggattgttctgttttcactctatcactgctaaaaaaaaaaaaaaaaaaaaaaaaaccaaaaactttggggcataaattagcaaggcatgtcaggaagtatttctttgaacccaagtatgaacacaatactgtgccatgccattccccctatcaataacagttcatctacactcctgaaagttacatgtacaggaatatctttttaactatatgtgtgaggagagtgtgtaggggcacatgtgtatgagaaggtgtgggggcccatgtcattacacgaaggcaaagggtgatgtcatgtgtcctgctccgtcactctctgccttgtctcggatctcccactaaacgtagaactacactgctgaccagtgagccccggaaatcctatcaccacccagcccacagctggagtaacactcacacaggagtgactgcacctaactttttacatgggtcctggggatttgaactcaggtcttcatgcttgcacagcaaagcttttacccattgagccatctcctcagtctaagaaatgtaaaatggcaagcaactgtatctgaatgctggagaagcagggactggcggattctgatactctattagggtgggggtgaatgtgagtaataatggttcagagagatttggggaaacagagtgtcatgcaagatttggctccccaccccacgtgtgtcaaatatccctgtccaagtcccagtgtgtctacatcaacccttaatgtctcattgttttcctctacttctgtgtctccaaaatgttctacattcagagattataaggaatgctatggcttttgacttagagtcaaatctatgatttctattaatgccaacattgaagtaaatttttccgggcgccagtcattactcaccattcataaatctgaaaaaaaaaatgttcttctgggattcatttaactcgtttacgttttcatgtgcaacttacctgtttcccgcgtgggcttgcaaaaaaaaaaacaaaacaaaacaaaaacgcacagggaaacgtaactagctttctggcctgtctaacaggctctatcctcaatttcaagttggaaagtgagcatgtgggtttgcacattaggttttccttgcacgggcaccgtgagtcggttcctgagcgagtggctggtgaatcccactgaccagatccagcctcccattctgccctagaactaggctggatttggatcctgtgagacatcgcccggtggctgactcttgcttaacttttcctcatagtctgtactttttctcatttgcaacaactattagtactgttctaaaccctccacaagtttgtcaggacatttctgactggtgggcaccactgtatgcgagtctcaaagagtcacacgtacctttacattcctcctttttattagaaatgcaccctggaaattaaatggaaggataggtttattttttttaatttatcttttttttaattttatatgtaggagtgttttggctgcatgtatgtatgtgcaccagtctgtgtgtctagatcccatagaggtcagaaaagggcatcagatccctggcaatagggttacatgtggtggtgagcttccatgtaggtgctgggaatcaaacctgggtcctcagagagcgcagtgtgtgctactaaccacatcaccatctcaagaggacgactttagactggaagagcctccaaagctagtgagcacagagagcgaattttacattcacttgtttttttctttttttgggggggcgggggggtttcaagacagggtttttctgtgtagccctggctgtcctggaactcactctgtagaccaggctggcctcgaactcagaaatctgcctgcctctgcctcctgagtgctgggattaaaggcgtgcgccaccaccgcctgttttacattcacttttaaatacattgttttcctccttatgcttgattttgttttggggccttctcctgagcccatgtctcagagaagcctaggaagccagggaaagttttcaagcaaacaatcacattcttatctagttacctggagagtttgcctcattattctggatgcttacagaccatctccctggcttttctttttgtagccttttctcagtatattgctagcaataactaaatattttgcataagtaatatcctccctgaaatagaatcagggttaaatgcaaggaaatagctaccaaaatagggagaagatgctttttattaattttgaaataattgcctatatgtacaattagagagagtaggttaggcttttttaatcaatagtaatataattaggaacacaccggttgctaattaggtctgatttcacacttagaggaataatccatttgtcacagtcaggggattcaaacctgccctcccctggagcagcaaggtgttctttagattttctcaggcactttctccccagcctcctcctggcttgcattttagttgtttacctggcttctctgaatatcacatcagctccttggggggtggggggtggggggagcgtactttgggtatttttgtttttcccacaataactgaacatcaggtctgttgaatgtgctgtacttggtaaaaagtttcaaagccatggtgctcacccgatttgcaggtgaccaggaggaacagctggtcagttggctatcagaatcataattttagcagccccccccccaaaggctggaagtctaacaaacataaatatcaactcttaagacctagttttgaaattcaaaatgaagaatttgataggtttgttaactgcacattacactcagccgaagagagacttagtgagctggacaaaaaccgagcagaagtcacccaaaataagtcagggagtaaaagcaaacaaatgtaattaagaggctatgaggtggcatatcaattagctaagcctctctgtgacaaaacaaccaagatatacaacttaaacagagaaaggcttacctttggctcctggtttccgaaatttccaatctatgaccacttgtgccctttgtccttgtgactgtcagtgcatggtgatacaggccctctcattttatgacagtcaggaggcagagtgcaataaagacatgttcaggtctcaggatcaccttcaaggaacgccctagccacctcacttcctctaatttggccccacctctgacctcacttcctctgacttggcccccacctctgacctcacttcctctgacttggccccacctctgacagtttctcctacatcccaagggcaccaccacccaggtgtcaagtcttcgtgagtccccaggggacactctaggcccaaccctaactgagaggtaattaggaagttctaaaatgataagagatgaaggatgaggcagaaagaatatttaaatagaaacatattgataattgtcaaaaataaataaataaataaaaccaaggactctagaaagagatcaaattccaagcagaaggcactacaggttttcaaagacaagggcaagttctaaaagtaagatatagattaccaccagaagcagaaatcgtattttaattactgtttacagctcgagtcttttttttttaattggcatcttgacctcactttgacatctgaggttttcctctaatgctgggatgcaggatttgaaggaccagtaagcacaagaactgcattccctttgccctacataactccagagaagggaccaaaacaatgtatagtgggtcaaaatgagacaaaaatccaacctaatacaaggaagaaatatcaaataatctgagctgtgagaaccagaagtaaataaattaccccacacaagagtgaatccactgatgtcaaagagtctgaataaaagactgatataggcagtcaccgatttttagtttactttttgaaacaggatcttgttattcagttcaagctggccttgaactctggctccccctgcctccaacttccacgtgctgagagtgtaggtatgcaccaccatagccagcttcatttgtcaaatattaatgaggtgtttgctgcagacactgtcttgtacatgcagtgtagctattactatatcctactatagatacttaggatatgtttgtttgtttgtttgtttgtttgtttgtttgtttgttttaaaaaaaaggttgaagacacaaaccaatggaaaacccctcctgtgtatagcttatattccactgcagggggtagacaatgagtatgataagtcaagcatgtactatgttagaatacaggaagtgatgaggataaaaatctagaacaaggtgaaagcggccagggatgccaagggtgggttagccatttccaacatgatggtcagaagaggtttgctcaaagtcacttccaactctgtatcggccttgtaatgggtttcaaaaagaagcttaaaattttagctaatgaaattcttttttaatatgaatatttatttatttaatgaaattctttcaattctgataaaaaacacggtaaaagcgggggtgacttcccatcatgtttatttaaaaagccattcatcttcacttagattccacaaacttctcctcagagaaacatttctttgaaaattccagaaggaaggctggtccctcccattggcatctcagaaacacgaggttagagcagctaattagtaaaaaaagctggtcagagccccaagttgtcgtcatggggaggagacacagcaaatcttgacggagcattccgaagctgatgggccgccctcctcttcagactcgggccgctatctgaaaagagaagttagcaaacatccagcttcttaggttcttcttcttttttttttttcttttggttatttgagacagggtttctctgtatagccctggctgtcctggaactcactctgtagaccaggctggcctcgaactcagaaatccgcctgcctctgcctcccaagtgctgggattaaaggcgtgtgccaccacacccggctacggttcttaaaaaattaaaataaaatgataatgtttttctctgaagttgagttctgcagtgcgggccatttgaagcagagggttttgacatgtccagttaacttgtagtcttctgttgcaggcaaacaagaaatccctttggacggttaaacccagtgagggtgcagttcctgcagaagatgacatcccactgacactgactgccaacctggacgacatagtgacgttcaaagacacggtcatcctggagattaagcatagtaacacctatcggatccccatccaggccaccgggattggttctaccattgtttccgacaaaccatttgctccagaactcaacttgggagcgcattttaggtaggggaataccatggggcaatcgtataggtaattacacatgtctcagtcttaattaaatggaactaagccccctccatccctctcctagctcccccccccactctttccttccttggtgaatgtaccggatagtcacaacttggttacatctgctacaaggagacatttccacactgtcatcccatgctctagttccctttctgctactgcggtaaaacaacttaggggcgggtttatttctccttgacacttccctgtcactgtatatcatttgagagaagtcagaactcaagtcagaacatggagaaatgctgcttgcttactcacactcagactcttgcttaaccaatttccttaaacatctcaagaataccgtgcctagggactagtaacacccacagtgggctggacctctgacatccattacttaatcaagagtagatcccctagacacatgcccatagaccaacatgataaaagctattatttgagcctttccaacttgggcccagcaaaatggctcccacaaagatgggtggcgagaagaagaagggaagaagaagggccattctgccatcaacaaggtggtgactggagaatacaccatcaacattcacaagcacatccatggagtgggcttcaagaagcatgttccttgggaactcaaagaaatttggaaatttgccatgaaggaaatggggactccagatatgcgcattgataccagtctcaataaagccgtctgggccaagggaataaagaacattccatatcacattgttcagaaaacgtaatgagggaaaggagtcaccaaacaagctctacacattgataacttgcgtgcttgttaccacattcaaaaatctacagacagtcaatgtggtaacaacctgctgaatgtcaaataaagttgcagaactgccaggaaaaaaaaaaaaacaactattatttgagactctgcttttttttttttttttttatgtctttctgtctttttgctttttgtttgtcctaagattctgggctgtgtaaagttgacttttgatgttaggtgatattctccaggctaaaaaaaaaaaaaaggtagtgactactttatgttagatacagagtttctgcataatcttccctctctgatttcaacacaccgttcatccctctccacaaatggagaaaatacggactcagcttagtgtaacctttgagtctacctagagaggtaggtctttgccaaagtagcagacattgcagagccagtcattttagacatcatacttcttctacttgcctccccagcacagcaccaacggtcccctgaccacccaggaaaagctatagggtctgactatttcaacaataggcagtgcagcagagacccctccttgagcagtgtgatccagtatggctatacaacacctgaggtttgagtgcaatgggcggaggatatgtgtggggattcattcctggttccgcaagggcagtatggagttatcagtcattgactcccagggtttggctggtttgtggttctcagctgctgtgctgagaacacccctatggttgccgctctggccttctgatgtaccagtcctgaacccaacttacaggcattatgttctgagaagtccttcccacagccccatctacccctcctttcctctgctttagctattaaacatggctcttaactgaaaagtgtgacaggcaagagcaacataagtaacaacacagagaattgaactgtgtggtttttgcacatgtccagttgtgtgttttggttgggtaaatatcaaaactttcctttctactttatctcttggccataaggaaaggcacttgtcattgtatactaatgcttctccttgaattccttatgtggtcacaaatctaactatagaaaacaatattcttcccaccatgtctaattgcttgagattcttctgaatctataagtagcatcaagtatcccctacccaaaggatatgccaacccttgcctggaaatttgagggctacctaacagtttttatgaatgtgtaaacaaaccaaaagaaccagcaaaagccttgacaggtccaccgaagccactgccggtctctatgaagaaggttctgttggcttgcagccaggatgtctctggctcttttcagaagagtgtatagaggcaggtagttatgcctgagatcagatggcccaaaggtctaacatgatatcctttagccctttacagaggaagttgaccaaaacctgtactaaggaatgcccatatgccacacctttctagttgcaaatttgagggcaaatctcttagatatttgaagggtttttttctcccatcttaatatggaagttaatatggttctggtggaaggtttctgtgattattaaaatcatactgtaaataagtaaaaaaggccaaactagcttattaatattatatatgtttactttttctcccccaaacttaccattggtcataaagttaaatcgtagggtagagtctgttctgttgactctgccccatgaacacaaatacttagagacaaacgtttttacctgacgactgaaattacttctcctgattatttatttgatgtcacaacttacttgtgagatatatcatttcctgaagtcaaacaaatggggtgaaatctcaaagcctaataaaatcttaaaagaaaaataagcagttgaagataaggtggggtgtttgtttcgttgttgttgctgttgttgctgctgtttgtcagagaggatctcactgtataaccctggttgacctaaaactccctatgtaggccaggttaaccttgactttatggtgatcctcctatctcaacattgcaaatgctgatattacaggcatgcagtaccttgcctgtcctggatgagcttcttttccttaaagaaaaatattttaagtctataaattggatggacatgcacgcgcatgcgtgtacacacacatacacacataccactttaacttctttcattatatcttagaaatcctagatccttcataaagaactaggcaaataataagatctttaataagtacccatgaaatagagaaaaaaaatgaattattgaatgaaatagttacaacttgaaggcgtaaagaaacgaggaaaaaaaaaaagtctgagaaaagtggctagcctagttggtgttctgttctacttcagtccggcccctccatcctgccaatgcttaatagggatgcattgatcaaattgaacttcaaataaacccaccatcaccacacatatctcaatcaggaaaaatgtattcaacatatttcaaaagcagatttctcctccagccagtgtgctttcctttccttacctcagaaccatttctcattaatgctgtctgtgtatcctacagtgggcccgacctgatgggggagacaaagaattggtgggccacattcctgtggcccttacctagaagtggtaattctgggattgggagcccttgactccctgaatggttgcttttgtttttgctttaaaggaatgtcttctttgggtgctcattctgtaagtatttccaacagactaaatccaaagagtatagagtcaaacccagcagccactcagcacctgcccttcctttccagcctggatacccactattaccgcttcaagctgaccaacaaaggacgccgagtccagcaactgttctggatgaatgatgacttccgccccaaggaaaagcagagcaagaaggaaccggggaaaaagggctctacttccagtagccgtcgccagtccaaggcctcccaggaacccacagataacgggaaccccgtgttccaactttaccccgtcaggatggagttgtacccgggacagacgattgacgtgatccttgaaggctattccgccacgcccaaggtgagaggaaagcgtgttcgaaagctggttttctcccaaataagtccctgctgtaccctatgtgtttcttaggcaggtcccttggcaatcaaaggatgacaagggatgtggtttctccaaggctacacacagccctgggttaccatgacagcattcattgctttcaaggttcagctccacacagttttccctttgtttctatagctaccataaccccaaccttaaaggaccatctaaagcaggccctcattacagcagtcaaggctaagcagccagctaatccctggtaggaaaacgcccagttttcattgcaagcaaattttcttattaactcagcaatctttattttttttctctctctctgacaatagcatgcttttatagatgttctgactgaacatccctgatttcttttcttttctcttcttttcttttttcttttcttttcttctcttctctttctttgctttttgtttgattgattgattgattggtttggtttgatttgattttgctcctttgtttgtttgttttgcaaccttgcctaactaagtgacaccccatttaaaaacaccatgtttggggtgactgaggagatggtgcggtagttaaaaggcaccggctgctcttgcagaggatctgtgtttcagttcccatatggcagctcacaatcagctatagaattccatttccagaaaatccgacaccctcttttgaccccttcaggcaccgggccacatacatcatacacatatacacatatacacatatacacatatacacatatacacatatacacctgcaggaaaagtattcatagacacacaattttgtgtagatgaaatagccacgttacactccagcaacaggccttctacttttgtatacatcagtgccacacattcaacctaaaacccataaccatattggcaatgtgtatctttttattacagtcccttgtggcatttagaaatcatcaaatacctttttttaaaaaaatgaaatgacccaggagtttttcccatcctagaaacacagactctccaggtgagatataatgtttgcttaagcccccccccccataggaggcttttggggagacactgaattttatctttataacaagaagcaataagaaattgtcttctggagataatgcgagccacgtagtccatcggccagcatctttagggtcacagatcccaccttatttcctttatatcatttcttcacaaagtattttcaggtagaacacatcttccaagcataaagggaattggggtagagggaacctctgcctggggagtcttacatactgtgtcccttttctcattattttgaccattatttctgtgttataaagctctggccatcttggacccaaagacatattctattattaagtcattaagtttgctgaaggatggttgtttcacaactgctggtgtgtgttgtgcacagaaagtcaaagagaagctggtgtgccaggccatcgtcggaacccagaagggcaaaagcttgctgatgtccgtgaacatcatctgcgagtttatagctccaatcatccagctctccgccaagcagctactatatcgactggaaaaggtcagtggggctgggctgcagagggccgggtgttctagccagagccaacatgtccatgctttcatgttagaagcttaattaactggcatcctgttaacacccgtcaccaagacagtgttgtttttcttctcaagcttctgaggccagtacacatttaactgaaaattccaaatgtaagccatttcttcaaattcaaatgtaattccattctctgaaacggaaatcctgtttccatccttcctggttctacgaccaaggggaaagggtacatctgtgcagacgatgcatgaaagcatgcagatgctccgccattttgacttaggtagagtaaatatcactgcagagaaagggttggaatagaatcagtgacaattataataattagtaataatgactacccccttctgattactattgctaggcatccatgctcaatgacctacatctttccgggtgtccttcacaaaaacaatcccaccatgagaggttccattaccgttcttgtgatacacttaaggaagctgacaacagcccctaagattgctacggaataagtaaccaatgagtagatcatctgtcctaagctgatggctgcattggtgttgaaaatctggtgaactaggcagacacagtcaaagctgagagactggttgaggtgacggacagcacacaagttagggaatatcacagttttaatcccagcagtagccggcttgtacatgtgttcattccgagtttacttcctcgagcgagtgccccaagttgagattgaagtaaaggtagaagtgagcctgatcacaagagaagaggaaagaactccagatgctgtctcctttctgttggggaaaagccctaagagcatatgagaactgaaagatgaccccagacaaagaacctgtcaagaacgtccaaagtcatcctggaaagaggttattccaaggatgatggaggtctcttggagatggggcagaggtcagataccctaggcatgcctgctagacctgttcgggactttggggttcattctgggaagctgttaaagggcttcaaacgagaagacaagtgtggtcaagtttattcattagaataaataattagaatgttgaatgcacagcaagacatttatttatttatttatttatttatttatttatttatttatttattcagccctcctcacatgccagacactgtcagatgctagcagtacagctgggaggatagctcttccctggtgaagctcgtagcctactgggaagaccaagcatatacccatgatctcttgctgtcctaggaaactattgtgtgtgactgtgccttacccatcacagggggatcagctgggcttcttttcatcacctcaaagtttacaggaggtcactcaagaccatttattgcagtaatacatcccatcatacgtagttcagtaaacgtgttgaacaccccatgggcaaggtgctgtgttaggatgtgaaataaagggacattacaaagtccaggggctcggagagatgtacaggttcaagtcaaagcaaagttttgaatgcctatcacgtactaggcacttagagcgcatagagaggagaaaagattctggctttgccagcttgcagaccacatgggtgttaagtgagggtttgagtggaagcagaactacccatgaggctgacaaaccctacaacacactgaacatggccaggctctaagagggccttggaactcactgctgtctccagtcccttcgttgtaatcagaaaacatgtttatctatcggcaaatagctgccctgaattttgtggcttcatattttccctggaaacaattattcggagggcttcggcaaggatttattgaaagctgttctgtgcaagacattatatgtcaaatatgcagcccagtttcttactcaatttttctaagcccattaaacactcatagcatatgcagtcagtgcacctcttcatctctgtcctcctgcctcatggcagaagcaggctaacatattcttgcttttttccctgctgttggtttctgcccagctttccttctctctaaatttcagaagcttacgctctcttctgccatgtttcccaccgctcatcccctgatcatcgttagaatttatcagtaatgatgaagaaatacaacatgcacaagaggcccgtgagggttgggtacgcagattgaattgtccggcctgcaagcattctgactgtatgctgttggcccagggctgtgtgtctagtgtggtacattagaatataaagatatcaaccctgcctgtggaaagggggttctctctttcttcccactccatcagctctatgccgtttgtatcgttcatacaccatagacacgaaacagcatctctgtgggattgaagatgccagctgaaactttcagtctccttgcttcatgaagttccagcagcagattctgtctactgctatctggggagacaaacagcccagagagaaggggtcattttaatatagattggcttctctggacttcagtttcttctcatcgctaacctccaaatggcctcgtgccaaaaccaaccaagtgtggcttcttcacttcagagccatccgcagtgacacagcagccttcagggaaggtcacactacatggacagttctctgtgaggcctgctagtcagtgggcctgaatatgctgctttccccctccaggaactcatactataaagggaatcaatgtctgtgttcattcttagaggaagagaaccaaaggctggcatcgtgggacaagtcccaggccagacttctgacataagcttggaaggacataggagctggcggattatcaccagagcagaagcttgagcccaaagatactaaggcagccaagcccactcagggcccaggaaacccaagaaccataacgggaggaaaccagtgttggaagaacaactggaagatgcagtcagatcaaaatatgaaagtgggattgggggctatcaaactgagtgaggaggaaacacaagtcaaaatgcggagaccttttaaagggctgcattattgttaattgttgttgttgttgttgttgttgttgttgttatagtcccaaaatgatcaaacgttttagagacttaagattgaggcttctgaccacctcttgctgatgatgctaaaggttccccttctcagaccacccaaagattaacgcagcctcccagcatcagaatgtggaaaccccgctctgaggcaaagcatctcacttgatccatcccagccctttctctattgaacaatgcggtccagcaggcctcacagagctagacagctccatcacctcttcctcaacgggggaaaattcacagggaaaatgcatgagtatatgccaataaaacgagataagcatgtctgcaaagtggctattttaagcgtaaggggaaccatcacataagagcaaaatgttttatttgttatatcaagtcctcgtgtctttcataagatatcagatttattagactttgttccatggtggcgtgtcaatgtgggtagtgacagtttgatcgagtggctgggtttctgggtttattttgttttaaattaagcaacaagaacctctcagaaatctctatcttctgggttatataagctcatgtttcagaatcctaacatcctccttctgctccatttctgtaaacctccatccaggggaataaacatctctgtgaggttgggatggcgagtgtgtgtgtgtgtgtgtgtgtgtgtgtgtgtgtgtctgtgtgtctgtgtgtgtgtctgtgtgtgtgtgtctgtgtgtgtctgtgtgtgtgtgtgtgtgtctgtgtgtgtgtgtgtgtgtgtgtgtgtctgtatgtgtgtctgtgtgtctgtgtgtgtctgtgtgtctgtgtgtgtctgtctgtgtgtgtgtgtctgtgtgtgtgtgtctgtgtgtctgtctgtgtgtgtctgtctgtctgtctgtctgtgtgtctgtgtgtgtgtgtgtctgtgtgtgtgtgtctgtgtgtgtgtgtgtctgtgtgtctgtgtctgtgtgtgtctgtgtgtctgtgtctgtgtgtgtgtctgtgtctgtgtctgtgtgtgtctgtgtgtgtgtgtgtgtatgtgtgtgtgtgtctgtgtgtctgtgtgtgtgtgtgtgtctgtgtgtgtgtgtgtgtgtctgagtgtgtgtgtctgtgtgtctgtgtctgtgtgtgtgtctgagtgtgtgtgtgtctgtgtgtgtgtgtctgagtgtgtgtgtctgtgtgtgtgtctgtgtgtctgtgtgtgtgtgtgtgtctgtgtctgtgtgtgtctgtgtgtgtctgtgtgtgtgtctgtgtgtgtgtgtgtgtgtgtgtgtgtgtgtgtgtgtgtgtgtgtgtgttgagggttttgttccttggggatcactgtacttactgggacttggtttgttccttcttttcctctttcctcttatccagaagccgaactctaacctggagtctgattaccagtccttggtgataaagaacatcaccaccctgcctgtgaacatgctgctctctacaaccagacccttcttcatatgtgagactgataagtccctactgcctgcaacccctaaggtaacttggcaaggagcttctgtgaaaaggaaggggataaaaatatgttgcctaatttcagtccagaaaagaaaatataaaaggaatcaggaaaccaataggaaaaaaatacagataattacaaataataatcaatagattattacaaatgtcagtcagtgggaagactcatgcgtagtataagaccttccagcccagtaggctagcccattatctcctgcccagcataatgaaggtaatttatacaaggcaatgaatgacttcctactagggaaatctcaccaaagtcccttacatgaggaacttgtcaggtccagtctcccagagaatgagccaaatgctaacaaatgcttcaaatgctaacaaaattgatgcaagctgaaaggaaaggctgtgagcctgtccctgctgcagatctgaagcaggaagcagcaacagcttactgcgaatgtccccatggctcttggctgggcgtgaggattacagtagaatagaaggccatgggcaggtgatgctatagagctgcagaagaggagggttgaaggagaaatcaaggccacacacacttttaagagctcagccttcccttcaagagagcctaccaatggagaagtagaaacgaaggcaggaaacagtcaccagacctcaggagagggagcctgtgacttaaggagatttgctatatgccacactctgcaagatggacctcggaagtgggtggggcagagtacttgggagatggttggtcagacaatgcccagatggtctcctccaaccaaaggacagggacgaccagctaagattcctcaacatagaaatatagagaagaggtaagccccaggtgagacacgggagaaaagagaccacagtggaacttggctgaggaaagccagtggaacaggcaggcccttagctctcgagagcctcagagagagtcagctgatatgactcagctctgaagaaaccaccgtgatgaagcactgggtgctcaaagaagagatggcaggtgacatagcagagcacagagcagatggatgggagggtttgaagattcaggcatgagtgccaaccccaggcccactgttgttgttcttgtggttctaatgggataaaagcacaatcccctccccctccaaaaatgaagagctcatagcaataagtaagtggatagaggacaaatgtaactaaagaatgagctgacttagatagatggcttttgtggcaaactgggggaggggaatgccacaaaaatctgcattctagaaaaacgttgccatgacgtttgaagagagaagctgttgtgcccaatggtgccagagcgtctctgagatgagagacatacgtaagagaagaagaagatgggggttccatatgtaccaaaccccatccagaaaacacagacaaaacaaaaagagtactcttctccagacacttggggtcaatgctgtcctcctggaggaagcccctcacccatttcctcattccagtgcccaactgagcccacagcctgctcatcctcagatatactggcctcagaaaagtatacagtggaccaactccaggacaataattagttccatggttccatggtcaagatcactggttcctattgcagaggacctgagttcagttcccagcaccagtatgggagctcgtaaccactgtaacccctgttccaagggacctgatgccatcttctggccttcatgagttcacacatacacatggggtacttagaaactcaacacacacacacacaatccatagatattttaaaatatttttattcatatagccttaataaaaaattcaaatttgttaaaaatagagaacttccacgaatcaacaggaacacaaaccatagcccaatagaaagtcaggagagagcagagttcacaggaagaaaatgactcttacacactggggaaaacagagaccacacggcatggactaaagccttccgattagcaaagagcaaacaatagctggcacttagcttaggcagggtgtgcagaagcatactctctgtgatgctgagcagagtatagtggaaggcaatatgccaatagttaccaagattataaatagcagtgtcctttgacctaggactctccatacttagggatttctcctacagacacaagatataagatgacacacatgcaaggtgcaagggtactcatcaggccactgtttataaaggccaaggcttaggaccaaaaaaaaaaaaacttgagagattgattgagtgaatgataacaggaatataaaactatgaagcttttaaaaatgagtatttcattcatgcttgaaaatttgagtgtcggacgggttcacctgcacaaaaagaaaagatttttaccacttttttttttttttactatagctatgaagtgaagaggccacgtcttagcgctgaaatgttggtggtacatgaatataccttgtttaatgacagaccaaaaacttgtactattaattttcaatgtaaagaggcaggaatgtctccagctttcctggatggcagataaatgagcagtcgtttagtttgtatgtaggtacagttggagcaccgtgtgcattctggactactttgacagaagtaggtttttgaatgtaacaagattaagtcgacttgagttgtaatatattttggggaatcagttcactacaaattgtgactgtaaacattgtactgtaaatgttttgtagtttcccccaataaaattttttgggaaaaaaaatgaatcgggatggaaagatagctcagtagttaagagaacctattgctcttccagagcactggggtttggttctcagcgctcacatcaggtggtttacaattgcctgtaactccagctctgggagctatgactccttctctggtctcaaaaggtatcttcatacatagatagatagatagatagatagatagatagatagatagatagatagatagatagatagataggcaaacagacagacagacatataaatatacacataatttaaaaataaaatatctttaaaaggcagatatttgatgatcttatgtagagaaaagtaaaatgcagacaagtaggaataatgtgccatcatatataaatagtaagcatgcatgaatgtgattttatgtctacatgcatgagggatgtctacaaagatagataagatacttgtaaagctagctgcctaactcaaggaaaactagggtcgaagtaaagatgactggagaaatgagctgagtttcatttttcctctaatacaagtgaaatcattctgaaggttcttttaaaataaggtcactgcttgtcctgagacagaatgatataggttatgcaacaatgagacatccaatgaagtcacaagattcatcagtaagagtcctaagcagaaaggaagagaattattataagaaggtttttgttatagtggcctcagacttctccacaagaacttaatgttaccagggaaacgactagagttttaatagaaattgtgatgcatggattttatagccagccataatatcctctgagaagaaaggtagcagaaagatgctctctggatgcaaggaatgattgagcattcacatccccttgtttaaagaatcgacaaggaagagattcatccatgcagcacagggggccatagaccactgtaacactgacccagaacgctccgtccatctagcagaaaccatgcaactttggcagctgggatttttgcatcagatcattttaaaccatgactttttaaaaatttcatcacagccagtaaaattcagaaacagaagctgggagtatagctctgggtagcaattcacgaagactggggttgactccccagcacccaaaggaaaggggcaagtagggtctagtgtgttgctcagcctctccaccccccccccttttgttcatttctgagattgtattttaattacatttctcctttcccttctcccccaagccctcccatagacccgtcatctgtctctccctcaatccctggcccctttatctcatcagctgttattggatatgtgcacttttatgtgcatatatatccccaaatatgacctgtttagtctacacaccaccctttcccagctcacgtttgggcagtcacattggtgagactttatgcatgcagcgtgtgacatggctaggaggccgccccgatcctccagcttttagtcttcccaccctgtctcttgccttgggtacaggaggattttgtagatgtccactgagagcaggctccacaacactgcacattgattggttgtgggtttctgtagcggtctatgcctgtggcatccagatgtttccttgatgaggttcccaccccttttttatggtcagacttcaataaaactaataaacatttagccattatttttgttgagaagagatcatgatgtttatacactacacgctatatgaataatatatattatcacttacattcattccaccctcttcagaacaggcatgagggaggtactatcattacccccattttacagatatggaaactgagctttcctctctttccagggtcatacagctaggaactgggagaaaccagatcctccaaatacaagcatcccgactctagagtctttcttcttgtgattaagtccctcctttacagggaaaaaaaaatctctcctggcttaagatttgtgtgcgcaagagcacacacacacacacacacacacacacgagtgctggtggacacagagacatgaagagggtctcatatcccctggagctggagttacaggttgtacgcactcagcatgggtgctcaatacttagtttgaatcctctgcgagagcaataaatgttcttaaccacaggccgactctccaggcccctattgtcagttctttaaagttcacaatattttttaataagatgatataatgaaatcctattttttatagaatccaactctttacccatcatgcctataactaacatttaccgaaagtattaactctgagaaacagcatggtaaaggatctctaatttaattttcctgctttttcataaaaattttagactttgtagatgtgcctagttgctacaaaatcttgcttctcgaaacaatttaaaatcagtcttcaaagacagatttgcagagatgtgtggagacgtctctatctaaatggtacccaggtacatgtgtgccagatgaaggtgaccatggaaaggcagggatgactctgagatagggttagacagtgaggtgcttctgctctcactcactctcctctctcctcccgccccctccatccatcccttcttctccccactctctgtgtctctctgtgtttctcacacatgtacacatacacacacgtgcacatgcacaaacacacacatatttgtagctatctaggtctgtgtgctaacggctcaacagtttgtctgggctgaatatattataaggaaatgagatttgtttgggttcagagttctgcaggtcatgagcatgtgttgtagatgtgcaaaattttgactctcctgtgttgtatatcatgtcaaactttcaaagtgcaaatgttgttaactggggactggtgagatggctcagcagttaagagcaccgactgctcttccagaggttctgagttcaattcccagcaaccacatggtggctcatgaccatctgtaatgggatctgatgctctcttctggtacgtctgaagacagcgacagtgtactcaaatacataaaatagttttatatatctaagagtaacatcatattatcttgtttacagcctataaaactggaggttgatgaggagaaacacctcctgatcaagtttgatccctcctacagaaacgacctgaacaactgggtggcagaagaggttctgtcaattaagtatctagaacaccctcaggtggacaacctgggcttgcgtgctgaagtgcattaccccaacctcagctttgaggtgatggacatagatttcggctgcatcctgaacgatactgaggtcattcgctacatcatgatcaccaactgcagccccttggttgtgaaattccgctggttcttcttggtggatgaggaggaaaatcagatcaggtatgccacatcacgccacgtcacgccacgcccctttctccccctctccctctccccctcccccaccatctccaggaggcctgtagacctattctgctcacttagttcctttgtagctttccttggggttaactgtgctctttgcactagcctttcgtgagtatcttcagtctgatgagtcatcactgactgaagagaacagaatctaaaactcaaattttcaaacagaaaagtgaacctattttggaaaaccccatcaccccaaagttgagaaggactatgcaaacatttacttcctgttggaatctagtggctagctcactaaaagttcatcaccaaaaatgaagtcattgtggtttttagttgaccatttcaccatttctgctctataagcagacttccatgttcgaacattgttgtttcttacctaactgaagcctaatttatgcctgttggtacccactcttctctccccgaacctaggcaaaccccatttcctctctttgatttatgaatgtgattatttttgataaatcacaggatagctgtttataaaagaaaaattgatagcattgatgagatatggaaaaactggaactctggggaaaggcaaattgacttcatcactgtggaaagccacatagaggctcctgaaggaagttaaaaaccagctctgggttgcagctgagtgataaaacataatgtcccaaattctcccgtgtcatcacatactgtagaatccccatccataaaagcagactgatactcttctctgctgtatgtaaatgctccattttatttattcatttgtcttgacatctggagtgtttaaaagtcttatcttctgggaacagcgctgcaaagctcagctctcttggagatcttgattttagtctactgcatgaagatccaagagtgaggttgcagaatcaaacagtggtttgataaatatgtttatttttactgccaaggatagaacccaaagttccatatgtgctacacagtgctttagcacagagctgatagtttcctagatctgtttttggtttggggggggggttgttttttaatttacaaggcttctgccctcagtttcatagcagctgccccatggtgcgccctggcaggaggacgctgtgctcggcacactaacacttggtctatggaatagcaaccatgctaaggggttatgtgaggggccggctctctcactgcggttgtgatttacatttctgtgatgacgtcaaagggtttggatgcaaatgttagctatgtgtacattttcatagagatgtctactcagctcattaacccgtctttaaatgggtcccttagttttgtgcctgagggatttggattggctgttgagttgcaggggttgcccatctgctgaggaacttagcccctagtcagttgtgtagctggtgagctccagccctctccggaagtgggcttttcagcctgctcaccttttcctgtgctgtgaagagccttttcagtcagtctgtctttgctttggtttcattggctacagttttccgtgtatgtgcatgctcatgtgtctatagctgcgtgtgtgtgtctgtctgtctgtctgtctgtctgtctgtgtgtatgtgtctgtgtgtgtgtgtgtgtgtgtgtgtctgtgtgtgtctgtgtgtgtctgtgtgtgtctgtgtgtgcctgtgtctgtgtgcacatgtgtgtagaagccagaggacagccttaagtgctatttttccagcaccacccaccatggtttttaaaattagtttgtaatttttttaattagcttacaaggaaagggggaaatattatttttgaaggaaagggagattgtattataatctcaaaaatgtatcggcaatgataaatgtgggaaaatatgagcttatatgattatattttgatttgatttgaatatgattatattttgtattcaaaagaattcactttcaataggtttccaggtagcatttccatacatacttggttcctcttcttccttactcccatccctagtctccctgcctttctgtctacttaatctacatagatggtttggttgcgatggggggggaacatgctatgcagaagctttttcccccccttcatatagtcagtccctttgtcagttctcagagcagttgcctgtgctagtaggtgtccgttcagaaatctgtaacctagacccatgcctgtactgtcactgtctcaagcttcaaattaacatctctgctccagcttgaactgatttctgtacaggatgcgacatggatctaattcccctcttctgcgggcatctgtggtttctaagatagtctctcactagcctggagcttttcaaagaagctaggctgactggccagtgagcctctggaatgtgctaccttccctatgctgggattgcaggcatgtgccaccataccatgctttctgggtgtgatctgtgtcttcatgctcttacagcaaacacttgaccagccgagctttcctcctctgcctctacagtttgatgtttcactttatttagtttttgggtggggtgcaggccatggcatgcacgtggaggtcagggtatagcttacaggagttggttcattccttctatgtgagtccaggggatcaaactcaggtcgtcagggcttagcagcaggtccctttaactgatgggccatcttagttttcctaataagcacgtcaaacccaacatatggagtatgctctgagtgtccaagcccgttgcacttcatattgcttgttctgaacgcttggaagggtttctgtttctggaccataccttctttatgtctagacatgcacagagctagaaaacagtagaagatggtgaccattttcttagtctgtgacaaggactgatgaagtaatgtacacttactccctgcatgttttgacagccgtggagggtgcacagccactctcaacgaggagacctcttattatgtccttagtggcttgtcagtgcttccagtacataatcccatcttatacaagacaacggcccttttcttgcctgtgcttgttaccatggtaacgatggcttgctctggacgtcttcggtagacatctagcgatgacccagtgtctcatcgaagctggcagccagtcctgggcctgagccttggagcctgctcattaaatgccatggactgtttgggtttggagtaaaattctgtagatgaacatttaaaataattacggaaagaatcagccaacctgacctaatgcactctgcataccagattttgtgaaattattctgatgcagcacagctaaatgagcttatttcatctgggagcaagggcacgccttatttatttttttttactttttgagaggccatttccataattaaaataatgacattttgagaatgtacttggccagtgctgaatatgatacatttaatttttcatcagttcatgcatatatttagccattttctttctctcttcagtatcttcctgtctctttatatagagtctttgcttataattcatttgttcattcaatcaaagggttgataagttattcagatgtggcatcagggatgtgaacatgagcaaggcctggccagccctgcccggaggctagttggggaagcagatgtggaaacactagaagatacactgtaatgacagggtctgaggaaggaagtaaccatgccctatgatgtcacagacacatgtcccagagcagaagcaagggagcgttcctaatcacaggaactgggcatggatgtaagctggacttgtaagtcgaagagacctggaccttgagccgaactaaaaagatggagccagaataggtctaaccctaccctggcttaaggcaaattcttataacaccatcaccacagatgagccctctgtccttcagctccgctgccatcaaggattgacctcattcctagatcagcttttctcccagtctccaaacggctaccaggattccctggactgtgttcttccggactctaaatccctggggaagattcactctgatcagacctatttagtcacatttcctgtcccaccctcccgccctgtcctcaaccaggaagatgatgtgctagtcgttacagtcctggccacacttgtgcgccactgaggctgagaagctgaggatagggagggtcactggcctaggccgagaatggactcagagaagaggcaaagtggatctgccagcatggcgagagcttggccttccttgggtgagaagagataatggaggatgttgcttgtaacagctcagtgtgccacacagaatttaaacacctagagtggtggagacgtgtgttgtcatcaagagagggacagagtcagaggtgtatcagaacaataacttgatagcagtagctggtcaccctttccatacccccatgctgttcttcccaccgctctgcctttccttctcagctctgccagctatcatcccctcttctcagtgactgagcctccgaatagcttcagcccatctctgctgctgagactctggtccccgctactatagctctaagttcactgcactcttccattgtctccttcccttggctgtctcccaagtgactcggggccaacaacataaggcaattcttgcccccaccccacccccgtttcttccttccttgccctctcctccagggctccttgtcccagcaagtggcatcactattccccaggaaggaccagaatcctccttcatccaaaccccacccactgcatcaaacccacctgctgtaccttataaaagcctcttctttgtctccactgctctattttattcaccatcacctgtgatgtgggtggttgtgacagcccttcctgtgtcctctgcttccacacgtgcaccacagtctcatttctgctcagggtcctagtaaagagcgtgcatgtgtctcccctggcttacgtccgtaatgattcagactacctctgctcttcagaattgagtgcaagatacctggggtgattcagtgatccttggcccagcctggtccctgcattcttcctagctggcttcctctcaatatacagcacaagaacatcttctgcctccttcactactggctcctgcctcatccagagctgttctgtgtcactgtctcctctctgccgaaagctcttccccactctctcctagcttcctcctagtcaatcctctagtcttaggttcggtgttcttcctcagaagagtctcctctgaggctcctgccctggccagagcctatcctatgagccctggtaccttgactttcttggtgtatgtcacacctgtacttaaagctcagcatccatccttccagtcggctctgaatccccatgaggctggccagtgcatcctccctggtatctctggagccccaaagcctggcagtaccctgagctagtcaacatcccctcctggttattgtggcaagaggaagacggttttttcataacttgtttaaggatctcttctgtcagtttcctggcacccatcaaataaacaagctcatggcataaatgtcacatataacagaaccaaaaatgccacctgccctccagaaagtctctgtgtgtgccatcagaaaaagagaaaaaccctggttaaaggtcattttatcagacatatcaacactaacctttcctttccagttagaattcttctgagctttgtagctggagagaggaatgaaagcaaaaatatagactttttttttttttggtcctgtatagacaagtatgaaggtccctaaacagatgtgtacaggtgcgcgtgtgcatgattttataaataattcttactcatttaaagtatctctcctatttgaggatacatttccttctaagttagcccccatgtcacacataagaataaagacagaaaggtttggtgagagggctcaggggataagaaagcacttgccaagcaggcctgatgagctccaggtgacacagtgccaggagataacgaagccctgaaagctgtcctctggcctccatatccacgttcatgtgcacatgtgcacacaccactgcccccccccaccgccctccactgccaccaccactaccaccaccaattatcatgggtgatgttgttttaaaaaattaaaaataaaccaaataagccaaatggacaagtatgctaaataagtgctcagaatcagaaagtgccagtcactgcgttaggcacgtgctgatcccatgacagtaatctagattgcctgtgcataatggtaacccttcacatatatatatatgtacatgtacatcacacatatgcatataacaagggtcttgttaaagggctagggtccttaccctcccttgggaagataagtctttcattgggtttgtcccttcagtctatctgaacatctcaagatgcttcagcaaaggcatataagaatggatggaggaaatgtctgcccttgaagtgtcctttgcttctaagaaaccagactagagatgcaggcgccaggggggggggtcatatgcagggtgcagctctacctggtctcacggctacaaagctgagcccagcgctaagactccaagcaaggggcctgagtagtctccacagaccgcttgggctttccatttccaaattagattacggataaatcaaacatgagagcccgagggagccgagtgcccgctgcaacagagcacactgttttctccttcaattgtggggtgagcaccagtcactcagcataattggaagaggaatggaagctctgcaaggaggggggaggagagaggaaatctgattttctgtcttcatcattcctctaattcttttgcttgagaaaatagaacttttctaagatgtactgaattcatggtattgggggtcctgagctatagagccagactaagccagttagagtccaggctctgtccgtctaacccttgtaaccccatgccctgaactcttagcccctataatggaggtaatttctagtggaagtttcataattaaagcaaatgttcttcataaaacatacatgtccataggacatactgagctctcctgccttagtaactgttttcaggctcaccaagggccccttctactcttctatggtcttgtagcaagtacaaccccaacccagaatcctaaaatatgggagccaaagaaccctcagacaccaagatgataaacccagaatctctcatctcttgggaaggcatagaaaacccttttcttataccagactggtctcatcaaggccacagcaaggtatattaatgttctcagtgctgtgacaaaggcagcttaaagaaggaagtatttatcttggttcatactttgagggggtacagtccaccgtggccccctggccctatgaagctgctggtcacatacacattcggtcaagaatcaaagagaggagctgggcagtgatggcacacgcctttaatcccagtacttgggaggtagagacaggcagatctctgagtttgaggccagcctggtctacaaagtgagttccaggacagccaggattacacagagaaaccctaggaagaaggggaagaaggggaagagcaaggggaaaggggaaggggaaagaaggggaaggggaaagaagggcaaaggggggaaagggggaaaagggaaaaagagaaggggaaagaagaaggggaaggggaaagaagaagaagaataagaaggaggaggaggaggaggaggagaaggagaaggggaaaaggagaaggagaaaagagaagagaagagaagagaagagaagagaagagaagagaagagaagagaagagaagagaagagaaggaaaagaaagaagaaagaagaagaatcaaagagagttgattgctgctgctaagtatgtttttcaatttccccctattggtcagtctagaaccctagcccataggaccatcacattatcacataaccctagcccataggaccatcacattatcacataaccctagcccataggactatgccacccacactgtgggtcttccctctttggtcaaacttctctggaactatcttctcaaacatacccagagatgtatgtcatagatgattctaaagccagtgaattttacaatgaaaattagccatcacaagattaaacaccacaccccttttcagtgtgatacccaaacacactactttgaatcataacatcccatccctggccaccaaagtctcttatttgtctcttaatgcaaaattcatgtagtcagtccatggcatttaacactcccaacactgtcctaaagttcaaagtccaaaatctctcctgagatttaagtcaaactcttaactgtgagcccatactataaaataaaaattaaaaactacatacttccaatatgcaatagcatttaataaacattcccattcacaaggggaagaatgggaaaatcccaaggaaagattagcccaaagtaagactgaaacccaacactgcaaacaacaagtcctgcagctctgtgtctaacatctggggctcatgatgatgtcatctgagctccagggtgcctgggcaatccctctagttctgctgactacagtatatgccatctctttcttgggccagctctcctccataacttccatttccttggcagatatcccatagtgctgccttctctaccatcctgggatctacatgacacttcatttttaccacttcaaacatggcccttcaggactttcttccaactatctaacacattccttgacctcacagacaaatgttttacattagcaaccctactcctggcaccagtttctacactaattacttttttgcacatgctgttacatgacacctcccagaaacaacttgactgaggaagagttcatctgagctcacagtttgaagggacacagcccatcatggcaggaaaggtatagtgagcagaaggccaaagtgattagtcagattgcatctgaaatcagagaggaggaagagatgagtgctgccaagctcaccttctccgtttttaccttttcttttaaaaaaaatttacattaatgtattgtatgtacacatatatgtgtgtgcataaactcacacatgcctgggcatgcacatgccatggggaacacatgtggaaatccaaggacaactttctggagttccctcatcctaccatgaggtcccaggaaccagactcaagttatcaggctgagaggcaagcacctttatatgctgagtcatcttgctgccctccatttttcctacttactcaggtgatgaaactcacatctagggtgagtcttccctcctcctccatgaaatagaaacactttccttggcacactcggaagtatgtctcctgggtgattctaaaaatcaaggaagatcatccattacatcagatcttagccaaaaatatatatatataggccatagtcagtgtgaggctcccttgacctccccaacattcttttgtagttaaatgagccaggtccatgattaaaagcagttccttgttctgtccaagggctcaacttgagctttatcgaatccctcaggggcaatgcctagacttcagcaactccaaagcaattcagtgtgctagttaaaagccaactgtgagtctgactggtacttggcccctgcatcaatgtgatgtgttgttcgggatggagtggtgatgcttgtgctgaccccaaacctcatgtatggaaaagacatgctggaccagtgagctacacctccagccccacctggtctatacaaccttggccactggctgattgtccctaaacatcagcttttatgagttaaatgagaataatgaaggtccttccattcaaagactggatgaatattgagtcagttagtacccagcatgctttcagaacaatgtcttcccccatcatccacattcagcaaaagctggccattagcagccatgtcttcatagaagacaacaagaagggcactttgtcatgttaataccaagtcacatttgagaagtagcaccccagaagtagctctgagatattttccccctgaaatcaatctgaggccattctgggacacacagaggccccacagagttggagggcttcagggacctcttgctgacttaaacttctgttccttccattaatatttctcttttcctaccagtgtgtcgcttctcaggaccctttatacgtctgcaagcttgtctactcttctcttacctcccagagaatagtttgggtcgaacacaataataaacagtcagctctggggctctaggaagataacctctcaggagggatgaatggtttcccaaagggcaaacagaaaagcagccagcttgtcttgggcaacgtttgagggtggtatttatgcccctccagtcccttctgcctaactctggctggtttctagagcaggttaatggattttgaaatgtccaaagatgagttcaatgagtatggggggatagaatcttcccctaatatgttcttaggctattgctgccttagcaaattgcaaactgggtggaaagacatggaaggcacctgactagagaaggggaggatggatgccaggcagaagagaacaaagacttcctacgcaatgactgacaagacccactgtgtttcctccttaccagtcctatgtcacatggacgtctggttctaaaattagatgccacctacttggaagggtagaagacccttccttgccgaggtgcaagaccaccttactagtgttctggattcatcacaagctggaggactcttctgacactgaggatgctacccacccccgaaacagctctgtcaccatggagccttgggcactgctaaggcactgtcacatctgctggctctgtagtttttctctttcccatgaaatacagcatgcctgcttctgaggccacagggcaagaccaccagtccagcaggaataaattcacatctctattatgagaaaaagctcttttaacagctttccagagcacaaagaaaatgtcttgagtcaaaaaatatttcctttagacagctgaatgaagtcaaagcctcaatgtggtgatattaggaacaaagagaagacggttccagaatactgaccaaaagcaataaatagaactacttcccatgtgctgggcaacactctcacatggcatacaaccaccctggggagttggtacgtgtgtcacccaccccacccccccaacactgaggccaccacaatggatgccactaaccatacagtcctggccttagacatcgtctcctgctaacacatcacagttctttgttctatatatttaattacagcatttccacccttcatttgaataggccttctgtggaaactctgcccagacattgtaacatgtactgtgggaatgcgaagactgattcatcctggtccatgtaaagacaaacatggaaactgcgcatgggaccctaagcccatgtaaagatgatagcatccccttttcccatcagacttgttcacatgaagcttatttatgaagtattattgccatggttttaacagtaaagcccaagcaatgcagacgagtcaccaaaataacagcattgggatgggaggggatttagaaggaggtgaaaggcagggaggggatgggaaaggaaggagggaaagagggggggagagagagagaaagagagagagcagtctttgcctatatagatatggatcataaaaacccacagctacagtgtgttccatagtctggaattactttgttcttcactccgcacattgcaaataccagttggtgtagaaaccctgtgaggatgctcagagtctggcatggggtcagtgattgatcggttgtctccagagagaagagctgatgcttgctgctctgcaatctctgggcggggctctatagcctctaaatgtatctgtcctataggatacacttagtgacgacagtcataccctcaactgaccacagtcctgcttcatacaaggaccaaggatgtttgcctggtcggttccctctgaggaccctgagggaaggatatactttctgactctcttggctggcagaccaccagctttcctgtatcttcaggacaccttccctctgcaggcacctaggctactttcccctccctggaaatactcaagccatgtagggttagagctttgctttgacttaatgacctctgacaagatgctctctctaaatactgtcgttttctgagttactacaaattaggagttcaacataagaatttcggggagacaagtctgacctatgacagtatctattttaaaaaaccatgaagcaaaggaggaaacaattgattaaattagactgtagacctcaaagcctagcatcagcaaaggacagctgtttagctagagagctctatagggcagagggctgtgaaccatactggaaagtttgatttagtttcaaaatgtcacaagctacaggagggctttaattaagagaagtgtaagcagccagaaactactcagcagaaacaagctttaccaacaaaaccgccccgggcgtcccatcaaccttccacaaaaagcagtcagtccactgctgtccttaaggagagggaaaatgtgcctaggcatagtgtctggaaggaaattacgcattaaagaattcttaattaagaaaatggtgtatcagggccagcaagagggctccgcagataaaggcccttgccactgagcacaatgacctgagttcgatccccagaaccccacatagtagaaggagagaatcaatcgagtctcataagttgtcttctgacctccacagccatataccatagattgtggatgtgcacagatagacacatatgggggttggggtgggggtggggagggaaagtgggaaggagggagagagaggctacaaagacacacacatacaaatttaacatttttttaaaaatcactaagatgctctctcttctctcagcacatgtgccctttcttccccaccccacccccactttttctctccccatggcaacttccctgaccataatccttgggtccagtgaactcacccttgcacaactttccaataaacctgcctctcacataatctttatataaaaaaatcactaaagataaagatgagcatgactttttcattgactttaaagattcaacttagtaataagcattatttttcccaaaattacctatatccacaatgcagtttcaatcagaaggctgacaagttgatcttaaaatttacatgaaattgctaaagtttgagactagccaagcccctttgaacctaagagcataatagtagtgagtgtctttgtgtacagagaggcaaatggaatagagagccaagaaacagaatggcaaattcataaagccatgacaaaattgaaattgttgaacccagaagaatagaagggctctgttcaataatagtcctcagagtgatgtgttctaaacagaactgaaagcccaaactgcgttcctaaatttccactataaagaaaataatttcaaatttcataggggtcaacaatgcaaatgagaaggtgcaaatatttttaaatttgaatgatgtatgagtggcaaaaaagtaagaaattgaatgggtgatctctaaataatggagaatttctcaagatttaagactttatgaagctattcatgaattcagcattagacttgagagtgtttatttatcaaagagacacagaaggagtgcaaagacggggtcacaagctgagggaaacttttggcacgcatattatcttcaaatgattagtatccataataaagaatagctttgaaggaaaaggcagaattaaatttagaaatgagagaacatggcagccaggaagttcactgaagctgaaatacgagtgacccacggagaatcaaaagctattccacatcattggtgatcaagaactttggaaactgaaacagaaggaagatgcttttgcacagccgccatgttggataaactaaggcagggcccccaacagcacaccattgggaggtagatgaggcaggctcagactcggctggaggaagtctacattatggtcactttagagtagattctgtctgttgggagtttcagccacactgaagagcaactggtcaagctgatgggagagttcccaaggccccaccctgctctgtagcctgtctgcctctgggtcacctctttctccagtctgcttctccctccgaagacccacttggttagtacagttctcctccaccatgcttcctgggttgatcttccttctggcccgccacaccttcatcctgcatcgaatcccactggggaccatccaggttcctgttgatcctcagtttctgcatggggacatgggcacatatgtcgcatctgggcatgcctatgtacatgtacatactatacacgtagagggcagagatcaatgtcagatgtccccaatcatttttcacctcatttttggaggcaggctgtctccctgatcctatcagttcagcatggctggctggcctgtgagcttcaggcatctgtctgtctgcacttgcttagtcctgggattacagacttgtgccagcacacccggctttttacattaggggctgggcatctgaaccccggccctcctgtttgcaaggcaagaactttaccacctgaacatctccctagcctctcattagttcatctctttccctcccagtgtatggaaaatatgcaaaatgttttctaatatccagaaaacagcatctgccgctctgccgaaccagccttcccatctgttcctctccatcagtaacttcctctggctcctcatagccttgcattctctgccctttgctctcaacatgacagcgccacgtcttagcctttccttctcttgttcctctttggtcagccactgattctgtcacagacagtagaaggaaatggaataaatgtgtctgtcctatcaactccccaagccaaccttaggtgcttggaatcatgaaatttagccaggcaaagccctgtcattctgtgatcattgtcatctgtctgtctgtccatccctcaccaaccccaccctaccacccctcaccaccaccctcagttgccccactctctccttcctggaggaatcacacgctatatgcaatcatgtgttagcatatatgccaatcactcctgttacaaaaatgcagttattagtaaattggggtccactgtaaaagaaaacgcatcagtctagctttgctgcctctgggaaggcccagacttcgggtagacccatctaccaagaatctcctctcctctgctgggaggggtccaaacagggggtcagattcacctcagagcctgagagaactgcaaacatcactcaaatctgagcttctagaaacaaacctgcagcctttgtgacccacctgcaagacccaaggtttcaaaagcagagggaggtccctggatcagggaggcctttagccctctctgtatagaacatgaaaactgaaagccatcctgatgctgtgcgtctctgccgtccgggtctatttgtaactcagtatactcctgtttcctgaagtgccagctctatttccccacagatgaaccagtaaaggtagttttcttgttttggtttttttttgtttttcatttcagttttgagggttataaaactttttttttgtccctgctttcatgttattataaaagactcctggtcaccttgttacaggttcaccctttttaaagaattttctgagtgtctttaatatcagccgcggacatcagcctcagggagactcaatgtgagctcagccagcttctaaagacgccagtggaacgaatcggagcagatctgatctcaggccggattacgcttgcttggctcctttagtggtagaattcataaggagttcgtgcatctacatattcacattaattagaagtctcccaaagtaagctaccactacgggaggccagacaactcaaagaaactgacttttaaagccttcctgttttgaaagtattttttcaagtgctttgaagctgaacacatttaggagatttcaggctacctgttcagcggcccttccgagagtgtgtagcagtggggacaccttctggagcttcacggaaatggccaattctcactgaaatctctctagagagcttcaaggtagattctgttaactgtcttcccctactcccctcagagctaagctcccaaggtgtctcctcaagggccaggccagtgaggtcttcttttccttagactacaagagaaggctcaagatgagtcaatacaagttccttgtgtgggggatcgtggtgtctttagacagaggaaggcctgttcggtgacttgccaccagtggctcaggagggttgccagcaaagctgtgagctttggggtcagtttagcacagctcagcaaattgttcgcttccattttgtcattttaaaagcgatagggcttgtggcatcctggtgcggagatcaaattgggcagtgtttattaagtaagtacctggcaggatgctggtgtacagcattggctgtggatactgaatgcaggctcccactggcacacataccttctttgtgactttctcccccacggtgatggggtcatggcctctcagccttgaatgcacactggaaccatggcaggggcttccgaacagcccgatgccaagtaaacccaatctctcctgttgtatctagggcctaggtcttttaagatcccacgcgtggccccaaagggcagtcacttgtgagaactcctcctaaccggctccatctctaagacttgagaggtttgagcttcagctcctcagctctcaccgccttccccttggcacacacggccaatcggaggcactggaaacacgatgacgtcagagggctgaggcaggctgctttcccattggcttcccctcctcctcgtgtggcacagctggagtaaacgctagcagggaaagttccagcagcctagtctgcttctatcacttgctttccaaggtaggcagaccgcatacatccaggcagtaaatgtgggagcacggcagggactttgagtttaggacacaggagaatgtcccatctagaagtatggttaaaagcaatggtttccatctgctccctttagaaagaggaaggaagaacagcttgtgacacagggattcagaaaagggagggatggagagaaggggggaacaaaagagagaggaggggaaagagggagagcggttcaaagcgagataattagaaacaagagaaagaagagaaatcgccttttttaaccctaagatacaataaatatatattaagcgtggcactagatgatatacgagctgtttgcatcacattttctaacgcagtatcattggccaagaccagattttgggtctgaaggaaataggctctacttgatggtggggttgggggaggcaacatcttctgcaatctgtgcttacaggaatgggagagatgactgtggtcgtttctatgccatccaatgcagtgcttagacaaaacaagattctgtgtgcatgtgtgtgttgtctatgtgtggtcataggcatggggggggggggggcagaggacatctgcaggcagcttcctctgtccctatcttccttactttttgaagcaggtcctctacataaacccacagctcactggttccgccagcctaactagccagctttgctctaaggaatcccacttctgccttctaagcactgaaattactcacagtcaagcatcccccaaccccagccagcattcatatgggttctggggatctgaattccggtcctcacgtttgcatagcaagccctctaactgccgagccatctccagcctcgtgggacttttggatagaattccttcttcaataaatgttgagtgagtgtcgtcttgaaacttgatatggcatcactagccagggacagtggtggtggagccaggccaggctgctgagtggatcacaacagtccatgaatatgaccccatagcatggccgcggggtcagggactatgcccccaatgaaaacagtgaagctaaggcttggaagtcacatcagtgtggactgggtaaagacgtagagttgccttaggcagagggatgttccatagactggccatgagaaagatccttcttggtacttggagaatttcactgagaactgaagagatggggagtgtggggaatgggagactcaaggcttcctgggtagacaagagtaggaagtctggccatgaagagctttgtcagagcactgcatgctcagttatagccactcctatgtctctgtctctgtctctgtctctgtccgctggccttggggttgctggaagccagcatctctcctctctggaactgtacagaagtactgtgggctccctccaggacgaggccgggacagttgctgcattgaggaaagagccccaggagaagagaagagggaagccagagagaatgaaggggaaccgagagctgtggttgcaaaattaactctgacctcagtcccatcccacgagggaaccctggagaatggaccaggctccagagtttgtccctctcactgtgaaggaagctgggctctttgagcctcacacccatcaaccagtcttctgcctgcctgtgagtccttcctacagaaaggctcataacctcctgagaaattcttggtgtgaggggcagtttctgtcagagcagagcaatgcttcagagaaaggtgctcccagaacccacagtatctgcgattgagcgcatcctcctagcagggtgatcgcgacaagggccatcagcacctaagcattcatttgggaaacaacacgtgctgattgtctttgtctagccagataaagcccatctgcaggccccttgcacaaagccagaggctgttctgaccctcaataagggacatttctggaacccaaatgtactgaataagcaaactggcagtcaactgtgtccactgcaaagctaactgtccccaccacctggaccttactgcccagacctgagtgtgtgtgaccttcacaccttccagtctacagacaccctgagaactccaacacacctctaaagtacaagcttgttcttggggcttttgttttgttgtgttagagcttgcggtggggggcagaggaggagcacaggaaatgagagaggtggactttgttgttgctgttgtagttttcacagcgtaaggttcgtattgatccttaaccccggtgtttacaatgaaacacaaagagagggactcttgagcctgcccagtgctgttcatcagcctgtgttggacattcagaagatgctgtcgcagcccaagaagtgtccttccctggcgtctccagcgaaccttctagaattggagcactattgattttccttgattgctgcctactctcttttaaaaataacgggatccaatcccgtgagagccaggaggacaggaaagtaataatctatgtgtaagaggaaatgaatctgatctatacctgaagggaaaatgaatctttgcggggtggggatggggggtggggagcagaaccaaggttgggtttgaatgggggtaggggcatcgggttttaacaagttaaagcctctattctgcttaaggcctcattgcattgaactcccttgtttgtttccagagacctcctgcttcccagctgaggtgttgtttttccctgggtgtgcagacacaggcagcattgtgttcttccttgacagacattccccacatgctctgtttttaatctggaagacatcccagggggcgggggaggggggtgccaatgttggaagagagattgctattatatgcacaatggcccagcagagggtctcccaggcatctgtgctgacctggggtgatttaataagtgctcagaattgtctaacgctgtttttcactgtccctagctggtaaggctactgtgttaaccccacattaattatcagctctgtcctgagctaccacagtgacttcccacccatggtggctgctcatcacttgaagcatctgggactgacttaaaaccaagtcctgggccctccctacccaagacctgaatctgcccaaggatggagccaagagtctttattatattaagtttctctctggagatcttcttgtatctcctcccatgccctccaacagagagggtctgccaagaaatcagagtcaactaatctgatctagaacaagcccagtggaagctcaagaaagataaggccgtccttggtgggggtttgagtacagcctactccttctcctcacctgctctcatttaactgcctaccctgccagctagccagctaatcaaacatccactgactctgtttagtagcctctgtgctgcagggctgaaaagaccctgaccctcccagagcccatggttccgtagtgagcccagttacagatgatgccaacctcgggtttcctccaggggaagccaactgatcctccttcataaaacagcaggcaacactccactcagagcctttatcgggcagataaataacattgatttattttcccctgttgagttttgaaatgaattaagaccaggattccatttgtagtaatcctataaatacattcccttaaaataagcctactaatgatactataggagctgccaccacataagctgtaaatggcttaaattaatctgaatgccaagtgtggctgttcagagtggcccctaaggctgaacatgcagaggtcatataatccagcagttgcctacaaaggaatttgtccaaaaagaatgagtgactccgttttccactactataatgaactcctgagccaatcaagaagccaaaggtttatttcagctcacagccgtactggcttcccgttcatacattggttgtgtcttgtttcctttgggtctgtgacaaagcaatacaggaatagaaagcagtgaaaccattcacctcattgtgagccggagaacaaagagcagaaggagaaagcagtgtcatgctatgtcctttaatgctaactccccagggacctcaaggccttgcctcccaagacctccatcacctgtgactggcaccaagctgcagattaagccctaacacaggagccttttcagggagcacccagatcctaatcaaagcagagaacaaacatgtgtccacatagagacttatacaccaaagctcatagcagctttacgagcagaatccaaaagctggaaacaacttgggtgtccatcatcaagatgctagatcagtatccatactgtgaaaaactactcagtgtcccatgtaacaagactaacattaaaatgttcatgttgaaccagagaagtcagaaccagtcagtaccgatgccgggttccatttctatgaagctgtgggtggaacttacccactatgccatgaagcacaaacccacaaggatgagacataacttctaagggaatgaaaggaaccatctgtctacaaacatggcagcagatacttgggtatctgttaaatttcatcaaataggcaagcaaaccgaaccccaataaaatcgttttattgggtaatgctggggaggcagaaatcagaaggtggtaacagggtgcctgagattcgggaaacagtactcccagcctcatgggaagtgagcaccatcctgaaccgtgaatgagaagctgtgataagccagggagactttcccactccagagggaagagaggaccctgccaagaacttctgctgacttcaaatgggtctgggaataattaaataagtgacctgggctgaaacttacagggagatataggggaagaagcgaaggagtccagagccaagtcacatgtgcccagaaagaaaagataagggtgagccctgaccttggtggcaaccaaaggcttttctttttttttttttttttttaaaaagatttatttattcatcatatgtaagtacactgtagctgtcctcagatactccagaagagggcatcagatttcgttacagatggttgtgagccaccatgtggttgctgggatttgaacttgggaccttcgaaagagcagtcggcgctcttaaccactgagccatctcgccagccccttttcttaatataatgagtgaaacctgagcactggggtgccagcctgtgcagccacatgtcttcctctgagcctgtttagtcagaacttgagtgacagcaaagcttgccaatggggccagcattgagccgtgttgagcaagatgcagaggactcagcgttataagagacagatcttgttcttttcttctttttcatgatcccagcagggcgagcttcacatatcacacacacacacacacacacacacacacacacacacacacacccaaccccagctctgccttctggcatctctgggagcagaccctcatttgctcccatgcatggttggccgtgcagtccgggcagtgctctgtatctggtgctctgtcagaatcgagtcctgggggagctcaccgtcaaccgggaatgagaaggaaaatgggagagggggagtcccaggagtctgtgtatgctcagagggggagactctggatccaggctgagctgggtgacccctgaaaaatctgaggatcgagcccaggagccaacgatctctaatttacagcgcctctttgtcttggtaggtttgcaccatgtatgaagccctacagcgccttcttgtcccagatggagtccatcgcggccacctcggtcaccgccagctctctggcagccccacacactgtagagtatacggagatggacttcagtgattccatcaagtaaggaggcaaaaccccgtgggcctgtccttagctgcgttctttcctctcaccgagcttaacaccctcagcctccatccctccctgtccgttcagccatacactagccaacagttgcatgagaggattctaggtgttcagcccaccatgggccctgagttagagagctgagaaccatctctgctctcagagcagggccagagctcttaatcccagggcacggagtccttccttccttcccttcactccctcacagagcgaagctctgcaggatgggactcaaggtagaaagcagaaaataacatccgtccatcaaatgccgcatcctcacaatatgatgctctgagtaattaggaaattcagctaggtatggtagcacatggagtactcaggagcctgaggcaggaggagtttgaggccagcctaggctacacagtgataccaagtctcaaaaacaaggtcaaacattataacggtgaacattgagcatcgaggactcaccggagaatggtctggagaactgcccgtgcttcccagcatgcattgtaagctagacacaagcttggtgctccaggaaagggtggccactgggagactgtgcagtgccgtggcccactctgtacatgtgaaggcagaggacagccgagcaccaccagctaacctcttagagaaagtgtcgcttgagcaatactccacttactgtgggatgtggcagagaggaagagacaagtgggggttgggcacagctgcggctgactggactggtggcgacagctgcagccccagtgacgctcacgtgtccttaaactccccaggacgatccttatggatgacgaagctggacccgaagaaatcaaaaagcccgcgacatccaccatggtctcagaagtatgattcctttgctcctgggccgggttagcaagggaaagcagagaggagccaggagctgagcgccaagcccagcactgggagggagctggcgtgagaggccggggagctgtgtccaggtcgcttctccccagagtgagcacctcagggagaggccaggatgcctcaggacacagatttccaaaaggtgaaaaactggtcatctccaggcctgggtggtcacgtgttcttcccactcccagcctaaaggccgctggctaatggagcagtagcttcctcgggaataacgcagtttatgcagtatacgccacaggcgcgttcacagccctgggctagggatggctctgtggctgttatgcaagcgtgagtccttgagttcagatctcctgcacctgggttacaacaacagcagtcccagcactgtgtgtgtgtgtgtgtgtgtgtgtgtgtgtgtgtgtgtgtgtgtgtgtagttaggtataaccccacagtctagctgaatggctgagctccagggtcagtgggagtctccatctctaaagacttaggtagagagtgatcaagacgtaaacattgacatttagcctccacatacatgtatacacatgtgcacaggcacaatacatgtgtacacaatacatctgtgcacacacattctcactgccatacacacacgtacctgtaacatccccccacacacacacacttatacagtatacacacccttaaatacttcctctaggataatagactgagacagtatataggctggagacacagagttctccactaaaaagatatttcttcttgcaccttagaaataggaggaaaaaaaggaaattagaaaaaatgctaaataaattactatacgtccaagctaaaattgagtcgtggccaaaaaaataggcatgagcagagattttcatacatacaggcaggagcaaattggtgtagcctctttgacatgtaacttggcaggtgtatcaatatttaaaatgcatacttcctcttctaaattactctccagatatgcctctgtgcttatgtgaagctaaaactagccttgtacatcaccgttttgtttataagagcatgaacattttggaaacaattgtgccaacaggagattaactgaataaaccaaattacatctgcacaaggcagtgctaggagttctattataaaaagcaaagaggttcttccgtattaaataaagaatgctaggttaaaaaaaaaaaaaaggacacatagtactctaccattcctgtcaaggcagaagtacataaaaacaacaactaatggttactttttaatattatgtgtgtatgtgtgtatatatatacatatatacatatatgtgaatatatattcgtatatatgaatttttgcctgcgtgtgcaaatgtgcaccatatgtatgcagtacccacagagaccagaagagggcatcagattctctagaactggacaaatggtaatgagcactctggcaggtgctgggaatagaacccagatccctgtaagaacagctatcgctctttctgagccaccatctctccagcccccaaagctagcgcatattgagcacctaatacacttcccatactcgtaagctttattctcacggtctctggtggtgggaaccactatcctttcccacttcagtgaggagatgcctgcaccaagcagtccaggtcacagactcagcaatctatgtcttttaaatggtggcgtgcgtgcgtgcgtgcgtgcgtgcgtgtgcatgcgcgtgcgtgtgcgtgtgtgtgtgtgtgtgtgtgtgtgtgtgtgtgtgtgtgtatgtgtgtgcatgcatgtgtgtgtgtgtgcatgcgtgtgtgtgtgtgtgtgtgtgtatgtgtgtgtgtgtgtgtttgcttatgcacagaatagccaagaagcaccagggtcatgagggcagaggttttctttctcctgttctgtccaccattttatcccttgtacctggaactagtccatagtatgacttctgtaagcattagtcaagtaaagacgggagagtaggttaaaagctcgccctgctcttccagaggacacgccccgcagctcccacagctggagaatcacagcacctgtcactccagctgcagagcatctggcgccatcttccagtctctgtggaacctccactgatgcgcacttacccactctcaaatgcacacatatacacatgaaaatagtttaaaataaattctcaaaagttcatcgtattaagacaataatcagatggagtctatcaaaaaaaataaagcaacagtggttacctgtttgaaactgaagagtaaggaatattgctggaagtattattttgtaacacatacaccctttttgctaccttacctttgcatcatgaatatgtgccaactacttttaatactttaaatgatgcttgtgaagactattctaccacatgaggtgtaggcaaacatatacgcacaggacagagatgcatatacatgcatgagtactgtaaactattaattgattgtaatttctttccttacatctttccctaccttttcatttcacacgtttgtcttctgaatattcaacaatgtccatcttcagagactcttgtcacagaaaattcatgcaatacagaaatatcagaacaagactcctttgaatcccaccattcataagaaaatactactgaaattcttagcaatctcccagataatggttttgcacattcaggcctcagagtgagtttacacccacccacccactcatgccttcagagcctgactcacatgaggcctctgtaatctcacaagaatgaaacacaccttttctctcaagggcatgttgtatgcattgatcctggtccacaaatacacatggagtcatcctctgtggaaagagaggtgccatacacatgctgtttaaagtgtgctgtttctggtgggcagacagcttactttcagaactcctctgttaaaaatgactctgccataaagtccgtatatatgcattttgagcattgtccaagtgtcatcataggaaaaaaaaatgtccaggttttaaaaaaaaatgtattttcaattacctagtcttgtgttagggtgggcatatgcatatgtatgcagtacccatggtggccagaagagggagccagatgcactcaagctggagttacagatgcccatgagccactcagcaagggtgctggggaccaaacaagaatcctttgctcttagccactgagctatctctccatctcctacaggctccattcttaccatcatagtcgctatatttccttcttcttacaaggaaggagaggtgtgcattagtgatgagccgtggcgtgtgcttgctagcttttcttccctctgtcacttccaggcgataaaatacagctccgcgggaacggaaagaagccagagccagccggactacccagaatgcatgtggatctatgaacaggatgagatgctgtctattggaatagaagaagtaagtgataaccccaaggtcctcagtcacccagcactgacacttcccagcaccttctccaaattggaaaatgccatctacccggagcgtttccactgtcaccttcacacgggctcgagagtcaaaagtcaagaatgtccatcccataaacaaccaccaaacccagacactattgcatatgccagcaagattttgctgacaggaccctgcgatagctgtctcttgtgaggctaagccagtgcctggcaaatacagaaatggatgctcacagtcatctattggatggaacacggggtccccaatggaggagctagagaaagtacccaaggagctgaaggggtctgtaaccctataggtggaacaacaaaatgaactaaccagtaccccccagaactatgtatctagttgcatatgtagcagaggatggcctagtcagccatcaatggggtgagaggcccttggtctttcgaagatcatatgccctagtacaggggaatgctggggccaggaagtgggagtgggtgggttgggagtggggtggggggttggggagaagggagggaagggtatagggaaatgtaaataaagaaaatacctaataaaaaacaagaatgcaagtcaagaatgagttttaactcacccacggcagccccgtcaccctgacagtcagtcccttgtgggatgcctttctgtgcaggtgtttgacattctgcctctctacggagttctgcggccctacagcagccatcagatatcgtttaccttctatggacactgtgacatcatcgcccgggccaaagctctgtgtgaggtggaaggagggcccacctatgaagtactactgaagggggaggcgtccctggtcaactactcctttgacacgaaggacattaactatggattgcaggtactgcagacatcggggtggggggtgggagggtttctgggtttgcctcaaacgtggcttgtggtcctcaggactctggccattcatccacattcagctccctgccccagtccctgttttcagtctttttctcttgctcccctcggtgcctcctccacttcagcatcacaagctgcttactgtccctctgtctctctcattagcactagcttctcacacccctccagtcagaggctccaaggctttcttgctgccccatcccacacaccccacataccctcagcgtgcagcgtttccaagttacccacctcagtcccactccaaatcactccagtcccaccacaggccctacctagataattgtttcgatgttttgggttttgatcttgaaagaccgggtgtcatgcagcccccagcttaccacaaaccttcactgttgtagccaagggacaatctcaaactcctcatcctcccacctacgcatcccaagggctaggattgcatgcatgcatagtgacacccagctgccatgcctaaatactacagcagtctgcccatactggagtacataaaggacctggggtctgattcagtggacccagcattgggcccagggtttcagtttttcaaaaccagactccctgacacataacgtcagtacctctggcctacagacacataccaagcaagggatcaagtcggtactgacccatttaggcgtcgttgtcagataagttttcccgaaagtgtatctttatcccatcatcccctgggcagctcatcccagcggcgcagtgctgagaaaagagcacacttctgttttgttgttgtagttgttctgggttttttgttctgttttgttttattttggttttcgtcttgttttcttatcctgtctggattcccaccattaccttaggaatcctgcctcatctctctgagcctcagcatctctcatctacgagatgggggtggacagcgatgccatcccaccagtcagtgttttgccctggtcgaggtagacagtcaccaagagttcccttctctgtccccaattagatcacttactgaggatgtcctaagcctttttttttaagatttatttattatatgtaagtacactgtagctgtcttcagacactgcagaagagggcgtcagatcttgttacagatggttgtgagccaccatgtggttgctgggatttgaactccggaccttcggaagagcagtcgggtgctctaacccactgagccatctcaccagcccctggagtctttttaataatggttttattcttagagaattttacacagtgtattttaatcccattcacccctcacccagctcctctcagatcctcctcagcctcctcctccccctccccaccttgttctgtcttactctcaagttcatgctccctcccccattcagggctgtttgtaccagccaactattcctgagtgcaggcttactatagctggtgtcacaccagtaaagagaacggtcactctccagcagcaaaccaataccagtagctcctggctagggctggggactctatgcccactcctgccctccatgcagctgccctgctcggtctggaagttacctaccacgcccggatcttgccaccctgatgccccactcttccatgtagatctccgagcccgagaggagaggcgtgatgtagactcccacttagaaccgagcgctctgaaatctctgttctccacacttgagcagcttgggtctctgtgccatcgtcctctactccatgaagcagctttgctcgtgagggttgggaggtgcgctaataaatggcattaccttattagaagccagtttaatagaatgtcattttagcagaattaaagtagtacgaggctttccccggggaccatggcttatgtagacacaggcctcagaggcaggtggccatgccatcttatggggtgaaccgtacaaccaatcaagaggtagtttgtaactcctataacacttacgtccctgtcgtaccaggcaggtccttgtagttcacgggagtcacggctaggtgaagctcatggtcacttttctccccagtagctcccacagcaccttccagcaagctgcctgaaagctaggctagccagcagggatgcagctcccatagagcaccagctggatctcttcatgtcccatgactcaaatgtgtggcatctttgacaatagggtcttactgtcaagttcttaaaggtgacctataatactggcaatagcctgtaacatttggggagtctgtgggatccccattgttaagccctcctctcttgtggttttgggttttttggggggcattggagttttttgaagtgggggggtctctctgtatagccctggaactcattatggagaccaggctagcctcaaactcatagagacctgcctgcctctgctgcctgattgctgggattaaaggaatgtaccaccacacccagctgttaagctcttctttttactgatgctctgtatacagacatcgagttgaccataatcccccgttataagatatccatttagttgtggccaagcaggtttacctactgcctctcatacaccccagccctcgctgcctccatattttctcatgcactattcttctcatgtcccgctctgccccacccccaccccagacctgttcatccagttggccacagctcagctcctttccagaaggagcatccacctccagaaccttctaccctgccttcacttggatcttggcacatctcagacacaacatgctttctaactggggtagaggtggccgtcagctgattctctgtgtgttgtgtactcagagactctactgattagcatttttgcctcatttgattgctgtcacatagctacatagcaaatagaaattatggaattgtgtgtgtgcacagatatgtgtgtagattgaagactgcatctgcattcagagtcatccagcgctgactgctgtcttctctgccctgttatccaaatagaattggcttttcttcttcacctccagggccctctaataactggtttcaattcatctctagagctatgccacctagatggacctgatcctacctaaggcagctaggtttgccctggtttgtccttggaacccctaaagtaggcctcagtttgagggtattaagcctaccatatgagatcataaagcatgctagcaaatctcaactgacatgttatacctctatggctcatggtaccaatgggaaaattaattctagaatattctaaatgtaaatactgtgttttaataggatcagatcagaatcaaatcctcttattttagaaaatttagattttccaggaagcctccttttactatgctcgatgtggcttaatcggtatctgatgtaatgtaggtggacatttggggatcccttttgtcgggctgatagcagaatcccacagacaggtaatggtccttcttctcatcctctccccagctgtttgaccatgtcacagaacgtgaaatcacactgaaaaacactgggaaagttggctttgagttcaatgtactgtctaactaccggtcttcacaaaggaaccttctccctggagtaccacttatcctgcctctgtcggtgagtccaaactgagagggctcaccccaaacagacaagccactcccagggcaggggacatcactgccagcacgaccggtgggactccgatacggtggcacatacctgtagtcccagagcattcaggagggtgggtgaggcagaagaatcagggaaaacctggtcctttgttactaggcaagttcgaggccattccaggtggtgtgaggctatgctggtaggcggactgatgggtgggtggatagattgatagacagatagatagactcaggaatactcggtcattaagcaaacgtttaccaagtcctccattatctagttctgggtacatcagacacatgatgaaccagttagagacatacaacttaaggatgtccctcaggataataaatttgagtcatgtgtgctaggacatctttcaagtcccagcactctggaggcacaggaagtgggactttacattcagggccaccctgtgctgtaaatgagatactatctctaaagagaagcaggaaaggggggcatcccacaggtacatcaaactcagggcttccctcatgccagctatacaaactggagcaacttttcattagcctgtaaatgtaggttggcatggcagcccaggtgggcagagactagagaatccccggattgagctgcccagcctggctagccaatcactgagttctgggttcgggggagagacccagctccaggtaaggactgaggcgatggaagaagacacccagtgtcaacttctggcctttttgcacatgcacacggtgtgcacatgcacacacgagtacacatgttctcccacacccatgtgagcatgcatacacatatgtgtgcatagcacacacacatacagacccaaacaactgctggaggggagataaatatgaccaaatacctcatgtggcatccacaaaggattggttttaaatatttataaatacggaaactttttgctgtgtacacgtgcatttctgggttgacacgtaagaccttactcccattaaatgttcttcacaggccacattttgcccattttaagtggtctccttctcatctttaatggcttctgctttgaacgcacttcagggtctcaccattacgctttctgctcgccttcccttatgccatagcctctttgtaggttgctcgctcacaaagcatcgtcggagtttacaaactgggatctgtgggatcgttgccttcctcgtgttttctctataaaagtttgccagatggtttttctatctttttctaattactttcttgtctcgttcttccgctcccctttgtcagcatttgggtttacaaagccgttgttagtgtgaactgatgcaaccctgtggagaaaatattgtcgaaatctattaggattactctttggttaacttttcctcatctgattatcataagtacacgctcccagatttacaagatgaagtgtgaataagactgttgtctgcatagactgtgatgccaatatagaaacagaaacaagctaaacatctcccaaggtattaagactgaatatactaaggtattaaaacagtgtggcagaataacatacagcagttacaagggacgctgcaattctagatgcgctaatgcggtgttgattctaatacctactgggtataagagaaaaggaaatgaggggacactgcattatatgctgctgtctacaccttaaaatataaccatgtgagtgcataatctggatctggtcagctcgtaaatatcagctagagctcttcttgtttgtttgtttgtttgtttgtttgttagcacatgaaaattggctcataaccctccctcttcatgctatgcttcactagtgtaagactcgtgtaagatgtgagtgcgtttctctcctttctgtcacctgggatggtttgtcagctaaagtgactgcctcctgaacgaccagccaaacctgtccaaatcccgcagacaccttctataatgccttggactcagccagagagccattccctcgctgtgattcattaccaccaaaggacacaaagcaaaagcagcaagggaatgaagcaggcagaaggtcaagggcaggagcgagtgagggatagagggaggaaggacagaaggatggaaggaagggcttatttaagaatgtagtccgtcatggtgtaagatggcctctgattctccacattgcagcagtagcctgaggcagctggtaacattgtgtccacggtcaacaagcatcggagagatggctgtctgttactaaccttgccttctcctttttattctgtctggcactccagcctgtaaggcatttgttgcccacattcaagctgtgtccattctgaaaacacctccacagacacacaaggcgggcttttttccacagtgactctaaagccagtcaagtagacgatgaagattaatcatctcagcccccacctcccagtctccacccctagtaataaactctgccaacctgagacaagccagggagactcactagagactgctggaagattttattggaagtttgtcagatagatgcttctgcctgtcatatcacaaaattccctcagaaagcaagcaaggagttgacataaactgtactgtttacacaagtaaggcaaggtaagaaagccccattagggaatgggcaagaaccttccagaactttggctcccagatactaaccaaaagtcagccttgcaagaggacttcctgggatccagggccttgaagctgctatgctgacccacccacccacccccttctagctcggacttctcttcatgtctgaatgggattttctctgtatggttttctttccctgtattccagctatcctattatgaagccaaattcttatcatgaaaacaaatgtttgctgaatgcagaattggccgtgcgtatttagtgtagaacaaaataaggacatttgcccggcatgaggctcacgattgcgtgagaactgtttttactgggaaaatacattgctaagcaatggagatagatgctaaggctcccctcaccccagtcactgagcacaggaagaatggctcagtggggaaacaggagaatattgtagactgcccatggtgccctttgtagctggctgggctttgacatacaggggttgggggcggggcacaagcaaggtggtgtacacactttaatcctagctctggggaatggagaccggcagatccctagtgcttcctggccagccggcttagcctacttgatgagttctaggccagtgagagaccaagcctcaaaaaccaacatgcatgctgtgaggaatgacaccccaggttgccctcttacacacttacacacatacacacacacacacatactgagagagggagagtgagcgagagagagagagagagagagagagagagagagagagagagagagagagagagaaacagagacagaagagatagaaaaaaagagagggggagataaaaaattaagaagagttggacagtggtggcgcacgcctttaattccagcacttgggagcagaggcaggcagatttctgagttcaaggccagcctggtctacatccggagttccaagacagccagggctacacaaagaaaccctatctcgaaaattaaaaacaaaaacaaaaaataaataagaagagatgaagcagaaggaatcataaacacttctgtggctagaatgtggccagtaggactttcctgtgtgaggttccactcacctttgtaacatcatctgggctgttatttatagctatgcggcactcatacccactttctgactgctaacctactggtttattttcaccttgcccacaatcctaatgcttcagtaactgtcttatgtgcacaaaatgaatctgtgaagcaagcgttggactctagaagcacaacaactgtgagctaccattgttaaatctggaccgtagctaatacatttgtccggatccatggtttgggatgtatgcagccaactatataaaatgcccctggggcgtctctcctggaccgtttgctctctcccaaactttattttaaaacagcacaattgtggctagagaggtggctcaggggttaagagaactggctgctcttccagaggacctagttttgagtgccagcatccacatggtggctcacaaccatctgcaattcctgccccaaggactctgttgcagccttctagtctccaccagcatgaggcatacctacagtgcacataaagcaatgtaaatgtacagttagatgtagtctatgcagcttgcttttatacccagcattatgatctttaagatccatctctattcttgcaccttaaccacagtccattcattttcactactgaataatgttccttttccagccatattaaaagcagtttcccatctcccattgaaaccacatttatgctgggcatgatggcacacgcctgtagtcccacctactcgggaggctgagactggaggatcacttgagttctgggctgtagtgtgctctgccgatccggtgtccgcactaagtttagatcaatatggtgacctcccaggagcgggggaccaccaggttgcctaaggaggggtgaacccgcccaggtcagaaaccacatttgcttatagaaagtgagttaggcagtagtttctcaatagaaacaattctgctatgcattttcccttgaacaatcagtggtagatgttttcctagggacttctgccaagagttgctaggtcacaggctatgttacggtctgctttatgtaaggatataaaatgtgttgttctgtttccttgtgctgggtttagtcttttcaggtggcccaggatggccttgatcataaaatcttcctgtctccactgagggctgggattctgttactgtgccattacaccgacctctccagtttccctgtctgcgcactgatcttaaagtcccagcagaagtgtataagcatttcctatgaggcagggtctcaccaaaacttggtaaactttaccagccctgtggttaagaaggaaaaattgtgtgtcttcttagtctgctcttcctttgtgacctacaaaggtaagaactttccctgttttagtcctgaaccaaaataatcctacaggtggtatcaccaaacctgatttcaaattatactacagagtcagagggatagaagcaatacggcatggggacaaaaaaaaaattacaacagaaacagagatcagcagaatagaattgatagccaaggtataaatccacacaaatacagttacttgattctttttaatacaaagatgccaaaaaaaaaaaaacaaaaaaccatgagaggaaagatagtgccttcaacaactggtatgaagaaagctggatttcaataggtagaaaaataaaaccagatccttacctctcacccttcacaaaactcaaccctaaatggatcaaagacctcaacatacaacttgctagtgtctggcagggggcagtggctcacacttttgatcccagcactgggagacagaggcgggcagatctctgtgagttcaaggccatcccggtactgttaaattgctaaaggaaaaagctcatttcagcttatgggtacaggtgagagctttctgagtaagaccccagtagcacaggaagtaaaagcatccgtgggcaaacgggctttctgaatcttacaagtttctgtatgtagaaagaaaatgtgaagtaattggatggccagcccacagagtgggaagacatccctgctagtgactcgttcccatagaggactagggtatagaatatacaaagaactaaaaaaacaaacaaaaaaaaacaaaaaaaaaaaaaacaaacaaaaaaaaactaggcattaagaaagaatcgagctactttagaaatgttttatttgttcctcgaattcctcctttaggcagtgcccgcccttaggctgtcagtgctctcccataggctgtcagtccccacccctaggctgccagtgtctgcccctaggctgtccccacccctaggctaccagtgcccgcccctaggctgtcaatccccgcccctaggctgtctccgcccctaggctaccagtgcccgcccctaggctgcctgcttccctggagttttttcttacagcaccatgtaaccatggtctaaccacccatcagaagcatgaacccggggcacaccatcacgccctctctggtctcgctatcatgcagggttttatccagtcgaataaggagcaggtattgaaagtttactacttgcctggaatacctgaggtctttcaaagaaacttccagatacagatcgcccacctggtcccagaaaacatcaccctgtacggagagggcatctttccacgaatcagccttgacctacacaggaacctccaaggtactgccaccctctccaatagcttacccacccccaatgcaataacttactcatccacccctggggggcggggcgtggaggacaaaatcttctagtgttttctttgatgttcatctttgaagatcagtggctgctcgctttgtttagtcattttatttgcctgaaaaaaaaaaaaaaaaaaaaaacttctctagtattattctatgttgtgcctcagttgccaggggttggggacaagagttagatttgactcaaactgtggtcattgcaaactaagactgctggccaattttgccatcaattagctcccaccaacaccaatgtggtgacatttgggccaagtgtgtattcctttagccaaagtgtctctcccagtctcctctcctaataacatgttcggcatcttcattttggagctggagtctggtgtactgtcaggtgtagaaatctcaaaatataacctttgcaggaaagcagccctagccgttagaactttactccagggttatatgcctaaaggctgaaaattagatattattagctatttgcctgtgtgcctagccccatgtggtcccagagccatcttcctgtgccaggctggtaactctggcttggtaggtcccaaagggcaggaccaaatagcttacccaccggatcggtggaaacctcttgctcttcatggcctccctcctctttgcatttcttagttctgctttcccgacagggtttcacatgaaagctcacttcccaggtcttctcctcctcctaaagtcacaaactcacccactgagcagcatccattaaattataactatcatgttatattgtattccatatgacatgattgtgaatagagataagaccacattatactctaacattagtacgtcagtcaaaggagggtaacccagctccacacatgctgccttcagtcatcaggacctgctggaggctgactccaggccctcggctactgaaatccacacatgtgcaagacccacacagaaaatatcgtggtatttgcctggaacctacacacatcctcccatgtacctcaacccaccactcctagactcatagtgcccaatacaatagcagtggtgtataaacagcgattgcactcaactgccaagacataaaaaaaataaataaataaataaaaataaattttaaaaaagatctgtacagcttcagcacagatgcactgttttttccaaacacttgccatccataagtgtttgaatttgaaggtcctgaacctacaggtagagagagacagctgtgagggtcggtcaggaaggggagccctgtgcctcacagttgaaacccagcacgatcccagtcagcatcctgagatagaggatgcggttaccagggagatttctcagttactcagatctgaacatcatttggtctgcacgggtgttgactagttgcagcatttctcatttttttcatagcaagctttttaactctttgcccacctttacctttgaagcatttgaatttgcagtgacttttggccaatccaagcatctgaaattccccctgccaactgtctacccaccttcatgaagggtattgtgactcacttgacttaaagtgacttgaccccaacacaccctctgttaactgggaggtacttagcatgtgaaaagccactgaccagctatctcagttcgttcagcaccaaaggggactgtcaggagtagaaggtttagaattaagaactgagcagagttccaatacatcccgaacctgcaagggatcccgattttcaaccatgaggcaaaggtctccttcctgaccctcacatgtggctctctgtagctgcagtttcctgcaggagcctgttaatgccttgtgctcctgaggaccagtttgtagctcacgtgctgtgtcattaaactcagtgaggtctcaggtgcgagttctactcacacacaaatgacctgtccctccaaagggaaagaaaatatgctaggtgaactgtcaaaacattccgtctcctcctcgctcccccctgagctgagagtcgaggtttgaagccaaactcatctctgtgtctgaccaggttgcttctctcccctccacccatcctccacaggcaatgaaaagtatgaacacttcttggaacaagcaaagaaaaacgtagaaaaagagtacactaaatatgaggctgtcgatcaatatgaggtgatggctgaggaactcccagaggaggagaccgctgaagtaaggcagggcggggcgggcaggaccgggcagggcaaggggcggggcagggcggggcagggcagggcagggtattgacgtgggttatcgcagaaacaaagtggagaaagatacagccaaggtaaaagggggccttggaaagacagcaagatgagcccaaagaggtgagcagctatctggagaagccattgagagtttgggacttttccaaaatacaagagggaggcactaaaatggtctaaccggaagtgctacgtcataattaagtttgcatctctgaaagatccctgtagcttcttgtggagctatgaggggacagggcttaatggaaccagagcagatatgaggcgatagaggctttttcaagctcttgggatgattctagatgaaaggtagtagtgatatgacgcccctgaaagagagggctgagcagagacaaggactattccagacctgggatggtcaggattgattagatatggaacgaagtagggacgatatttcacttgcctgtatcataaagaagtgtattgggagaggaaacttaggaggaaaatcaagtttttgtaggaaagggaggaggggagatgaatcaagatggtccattactaagcatagagttgcttttttttttcttttttgaaatttcatactcatttacaaagtatcttagccacctatgcatctcccacccactccttccagtccttccaataacctcccccatctcccctctgtctcctaacttcatgccccctcttttttcaaaccatccaagtccagttagagcagtctgtatgtttagatgtatgacatcatctactgaggcatgaacaacctaccaagatccacctcttcccaggaaaagtctccctccattggcagccgtcaaccaccattgtctgctcagtgaggggtggggcactgggaacccctcctcactcagtgctggatttttttaactggcttgatcgagttgtacaggtaaccacagaacttgtgtgttcctgtgtgtagcatccatgctgtgtcccgaagccagcccttcatggcaaccccccaacctcctctgatctcacatccttttaacccactcttccaagatgtctcctgagcctttgtgaggggagaaaggaacatggttgcaccatccagagcggagcgctcagaatcacttactctcggccttgaggactctcctgaatctactctaaacactaccctccgccataggaaaccttctctgcctgtaacacaaacttcaggggatccagtgccagtgcctctggccactgtggacctctgggctcaaatgcatataactacagacacacatcttcacataagtaaaactttgaagaagaaactgggggtggaacgtcctaactttgtgtccttgcgtggcactagaaaaacgcccattgaagctgaaatcatgcagagaaaacacacagtaggtctacagtacttaagaatttttgtcaaaacattttttttacttttaaaaacatttatcatatatttatttgccaggggagtatgcatacatcacagagcagctgagagagtaagaggacagctttcaggagttagttcttccttccaatgtagggagtgaacccaggccttcacacactggcagcaaatgcctctttacctgctgagcccatgtcaaaacatttttaaactgtatcgtttgggggcagggagatgggtgagcatctgtgagcacttgcggctcttccaaaggatccaagttcagtccccaaggtccacacagtggctcacaaccatccctaactatagttcagggaatctgtgcctctcttctgaactatatgggtaccagccacatatacagaacacatacatatatgtaggcaaaacactcatatacgtgaaataaacaaatctaaaacattttttttaaaaaaaaacctcctcatttataagtgcatgaaaatttattcattattaacctttacctggtacacatttaaaactaggaaaaagaatcaggttacccttagtgggggggaaaatcctaccaacaatgagtagagagaatccacattgtagaacagtccttccgaatcgctctccctctcgcttcagataagtgctcatgtccagatggaagtagagcgactcatagtccaagactatgccctggaacaccagagaagcatctccaataacaccgaggacatctacttcagtcagcggagttgccgaaaactcaccaagtgaggccctcttgcatcggtgttgcctttgttctggagtgtgttggagcaagcagttctttgtgtctcctgagatcctgattgatcccctgggactggaagccacgtgcctcacattagcagtcactccctagcgtcaagccagtcaggcaactctggctcttaaagccagaacaccacagccagtaggcaggccccatctcatactgaacatgtcactggataatgaccaaaacacacatgtggacttgtgaaggatgcacggagtgtctagtctttatctagtggtccttagctgtcctccaccaaacacacacacacacacacacacacacacacaaaagttgcacccagaagagaacatacactctcttccttcgtgaagagcggccttctgggcttgaaagtgaccagtgactaggacatccccctgactgtttcagagtccagctgccagagtacatcctggacttcggctacattgtacttggtgacgtcagaacccacatcgtcaagatcaccaacaccagccacttccctgtgtccttccacgcagagaaacaggtccttcacgaaacaggtaccaggagccactcgcatgtcccatctttccagggcccgtgacaggcgcctacccccctgacatccctgcagcttctgcactcagctaaaggggtttctaggctgttctgccataccttggtcagcctattgcagagggcatagcagcttctatgtgctgttttccttgctcacgaaaaacatttttcttttcccctctgtcttgggtccaggcttcagcactgagctagaccgtgtaaagaacctgccttactatgagacagaaacatttgaagtgaggtgtgacccacaaggggctaatctccctgtggggaacaaagaagtcattctccccatcaaggtacagtgtacccctgcctaccatggccatccaggtctgttgagaatcccaagatgatgcagtactgggtatcaaaagccgggctctgagcctcccaggcaagacctcttatcaccgagctacatgcccagccagagacactgttttgctgtggttttcccctaactccaagtcacagggtaactgtaattccctgtctgttctaggtgtacggagggccaaccattcacctctgcctccaggccacggtgatcatcccaagtatgaccctgtcgtgcaacaaaatagagtttgccacgattcagtgtgggcagtgcatggtggaaacgatccagctttccaaccatctccaagtcccttgtgaatggttcgtccacaccccaaagtctactaacaaggtgaatcgtgttccccttcccgcctttcctacttgagccagagttgggactctaggcccttcctcccatcatcttaacttcccgttggaagactctcagtgtcaaccatgccttgccattgggtaaaatgtctgacttcccttttgcctcccgtgcacactccctgatgccactcaggaagtgcagctcccctatgcgtggggaatggaagggatctgctctccacatataagacctaactgtctcaccttcacaacccagctggacaaacacatgccaaagtatttacggcggaagctgcaagccgagatgattcccaagtctcggatctttgagatccaacccacttctggcatcttggatcccggcgagagggctaatgtgcaagtgaaattcatgcccaaggaagaggtgagctcaaaagagaaatgaggctttgcagagatctcccttctgggtctctctgaggtcttaagcccaggcttgcctgagactcaaacctcccattctgcatatggcctgtcctccaagttcacccacttgctgtgtggcccagcgggctgggttcagtagacctgagtaacaccacctttctcagtggcacggaattactggcatactgcttgggtatttacaggctggggatctttgaacaaatcacttgtctgactaagccccagcttgttcataggtaacataaagaagcaataatattcccatatcaaaacttccttattgcaattctgaaacccaataaagcttccaaaagtgtggggtggggggttgaaatttcataagtctcatattaaaactcactcaatagaaaactctcattttaacggacacggccgtttctgcctttctttatcatacttattttccaagcgttgcagctacagaaatattaatgggtttcattacaggagatgtcactgagactgctcagggcatcaggtgacagagcctgtatcctctgcgcttacctctttgcaagtcagcatataaaagcagctagaagctgaaagttcagataagcgagtactgagctgcagccatggctctctttgggtcgttctaaagattaataacaccaaccggagcacagagcacactgctcggtgcgccatccatgacccagtgactatgaacacgagtgacgcaggaaccataagtcatcacggcggccagcacttcctggcagaaagcctccctgaacctcacgaatgtcatcagtgtgaagtcactcctaatggagaacatggcaagcattgcaaaaatcctagaaccagagaggctctcaagaagtcctccctacccccacccccaccatgacaacgtttatttaaagcctaagatatccaagtgatattttccttttgattgttttcaaagacagggttttgtgtacctcagaatggcctggagctcaccaagtagcacctaggatggcattgaacccttgatcctctgccttccaagtactggaattataggcatgtacatgtatacacacacacacacacacacacacacacacacacacacacacacacaccatgactccatggatagataagagcactgtctgctcttgcagaggtcttgagttcaattcccagcaaccacatgatgactcacaaccatctagaccaggacctgatgccctcttgtggtatgtataggtgtacatgcaggcagaccactcataatacataaaataaataaatctttaaaaaaaaaaaagagtgtcttaagatttagccaaaatttgggtgttattttctttttctttgtggcactgggaattgagctatcctcagcctggttttgaattttttttcacttctgaatgagggagatatcactaaaaagcaggggagatggaatgttcgccatgttcctggtagtcattagtggaagttgctgctgcagctgctggacaagattagttccctggcttttctgttgtacccttggctgcccgtgggaatttgacagtctcaggcccagacagggtgatgcccacagaggaaactcagaggcatgagaatagattagaagtccttctcaatttgagcgagccctggcagagtgccgagcatgcgatatacacagcacacaaatactccaccacagagattgctctttcacagctctgtaggaaatatgtctcctttcatctggagacaagaagttttgtcccttttgtggctctcagttttacattgtgtgttgttgtttttgttttcccccatgttttctagaaactttacagccagtctctgttgttccaaattggccagagctctcagaagctgacacttctggcccagggtcaaggcctggagccacgcctggagttcagcccttccgttctggaactggggcccctcctgccttttgcatcaggagatgaggccgaggtgattgtgaggaacccctgcaacttccccattgagttttactccctagaatttgaccagcagtatctcttagaagagaaggtgagtagagacaaaaccaaacccccttcctgacatgacaggccccacccctggcatgcgtccttgtgtctgcagtaccttccttctggcctttcccctcctctctccttgtcagtttatcaatctctcctccatagcatttccccacttgcttcttctctccacaggtgaacttattgctttttttttttaattccaatatgcacttttaaacaaattaaaaatccagtgaatgtttatggtcaacatctgcacagtaaagaactacatgtaacaacctggcattatatttaaaatgattttcttttatacttcctataattggggcacttaggaaatacgggctggggatgctgcttactgacttggtaaagctcatttccttaaagcatgaggacctgcattcagtccccaacagtcacagtggtgcatagctgtgatcctagcactgggagagcagagaccagtgggatttttttttaagatcactcagaatcaaccatgctagctggatcattaagcttcaaattcagtgaaagaccctgagtcaaagcaaaaaagtagagagtgattgaggaagatagagaaaaatcaacctatctgccacatgtgaacacacacacacaaataaataattttaaaatgcatgaactatgacaatctctgcccttagtttgaataatgtagaccatttacttttaatgtaatggttgatatactgaggactctatctgccattttgttttgttggttttgctttttgtcctctgtagactttgtgctgccttcttatcagtccttccaatgttgtttacctttccttctcaacttatctggagcatttttttagcttctttatacagcttctttagttactgctacacatgttgccttgtgtctatgtaacttattatgaccaattggggatcaagctcctcattttaatgtaactttgttaaatctttccttataacactgtaactacatgttgttttgttagaaaaccacagagtaggaggcatttgtccatttactctttccattattcatcattttctttctgatattccagtgcttcttttttaccatttcctttccatttaaagatccattactggctacttttttattatttttttttagctagtacacagaatgatgagtttcattataacattctcatatatatatatatatatatatatatatatatatatattgtcattgtaacttctaatcccatttactcttttcttagcaataccctgcatgcataacatcaccacataagattagctaatctagtgacattatagccatctcagttttaaaacagtgacaaattcatctaataacacaatctcacgtttcagaacatacccctctctttagttgacttgtaactgtactttttaaaagaatgataatgtaattgtatatgtttgttattagaagaatctagtgtgctattttcaaagaaaaaaatcatctccacgtgtgaaatgcttgggcagatatcaaaaaacataaaggttttggatccttgttagttcaggatttagctctatatttagacctctccgaaggaccccaccatgtgacacccgtaaagcatctctccaaatctcatcctcgggtttttttgtgaggccagcgagcaagaggaaacctccattgaggccaacagtagctctcaatctctccttgagcagatgttgcgacagctgaagggctacgactcctacaacaccctgctgctgcctccccggaacccaggggagaagctgccaccagaagtctatgattactttaaggagatgaagaaatcgaaagaggagcacatgaaggccaagtacatggagaacctggagaacggtgagaacccagcatggagctgagcaagctctgagccattgtcccattctcttctagttatccttgccatgggaccaacaacccactcttgagtacctgccaggtacccagagccttatatatcctgcttaagaccattacaaaatgggtctgaaagaacctagcgggggaaacccctactcaagtcctgaggcagcacacacccaagaaatcacgagagactgtcttgatgcaaacacacgaggcagtttaatgaacggagctccgggccgacatgtatctcacgcaggagacaggggagtcgaccctaaggctcaaaagttaggggtttatataggaaaggagtggggggataggggaaattggcgcagttacacacaagtgggcagtttaaacatcagtgagcagtatgtgacagtaactctaaagggagggtgtttatcttggttggcaggtcttctggctaagctcaaaccatatcagcatgtggcccattactcatctgagcttgtccagagattgtcctttcgtgcctttcttatctcaatggctagttggttcctgggataactttacagcttttgtattggcccaactctcttatctttatggctttaagtctgtaaaccttctgactagggccttgaataaaccttctggctagggctttgaagccttgaatttagttttctttctttcaggtcctgtggtctttgtgttaaggatgcagaggctgggcacagtctgctttcactaaggtccaggggttactgagacttaaaacaagggtgaaggttaaagaccacattcaagattgtcctctgacctcctcatgtgcacacacacacacacacacacacacacacacacacacagatgaccttgaactcagagatctccctgtcttcaagatctccataccaagatccaggtcagaaacttctatctcccagcctccagattagggtcactggtgacccttccagttctggattgtagttcattccaaatatagaaaagttgacaaccaggaatagccactacaggttgggtttcattttgttttgttttgtatttcatttgtcccagtagaagatggtctggatccaagctgatgggtccagggacaacccgggcttgatgctcaccagtacctctctcgacactggttcacactgctttcatgatgtggactctcccttctctgaccatgacccaggggagggcggctgcctctagtcacatctcagttctaaacaaaacacaggggttccctaggtcagtgagagatcacctattgattgtcacaggctgttgtacccactgagacaccgtggaagagcaaagaccaagcagtgaggtgggtggcggcctgacaggggtcaggcaccctgggaatgttggcgaggcagtgagggtggaagcaggctccagctgatgtgtacagaatggtctccacatcattctgaaagcctgagaattaaagatgtggacagtagagttctcctgctccagtgattataaagctagcttcaactcctgtcaccctctgtctctctcaatccctgtaacttgtgacgattttaaactttatattctggggctctttggaattctccaagtttctgggtcaactgcacactcttggtatctaaacatgattaaatgctgaagcactggcgcaagctcatggttggtcttgatttttaggattgggtcggcactggatgactatcagtgcagccattctttattagtatgattaaataatatgtttgtattaattctttgagaatttcacagaacttattttgatgatattcacccttgactcccggcccccttcctccaagctccacccttccttgttcctcctccccgcctctccccatttcctgttttcttttttcctggaatctctttccccctccccctttatcccctctcaactcccttccggtgtgttttcatcctctgcacccctccccagcagaagaggaagaaatgaatacgtctgaccaaggaaccaccagcacaaagaggacatcaattagccgagggatctcagtcacatccaacctggaagagcggcatctcacaattgaagccaaaaactacctagatgaggatgactatgaagaaagcctggaaaaactaacatttcaaagtaactgagcactgctggaggggtggggatggggggaaacactgctgggggcagggacagctctggctgagcagaaatgaaagagctgctcaagaaagatctaagcatctttttccatataaaggggtactctgggtttctggcagtgacctcccacctaccacatgcaccctctgttgaagactgacccatcttctcacacagtgctatgagcatggaagcctgcagagcagcttagtgtgggatgtgtcctccttgccacagtcacttgcattttaacttggctaaggaagacccaatgccttaatgctaagagtatggccaaatgggaactgttataaaaacaaacagacaaaacactctgaggatgtggagaacattcttttagacatccctccaatcaaaccactaagaaaccctccatttcacctcccagcatctaggatccatttttctgacctttattttctctgagatctgagttaaagctgggggcacagtgacaaacccaagacaaaggcagaatccttggtgcccatcctccctggcgcccaacctgtctgagctcacttgcccccgtgcatcagtccctgaccttttgtggcactttctccccattgcacagtcctggctcctcccgtacacccaactccagactcttccacatggccatcctttctatgtttcaacaagagaaatcccttccagtggaatttaagtcaacgaatatccttttttttttttcactttaaaatatagacacaaagtaatagccaaatgaagcattcttgtgcaccatggcagggactgctgcagcagtgggcattttaaaaaaacaagagtattttaaaggaaaagactcattcccatcgctatcggtgcctgtgtccctatgtaaatccccggatgtgcgcctgtgcacacgctcactgtggtttggatccctagccgacaagatgcagagcacagacagccactccgtagaggaggttggagaggtggagagcaatccagtgagcaaggcaatcgcacgccacctgggcatcgacatttctgcagaaggccgcctggccaagaaccggaagggcatcgccattatcgtccacgggacgcccttgtcaggtattcgacgatccctgaggggagactgtgaacagagataccacgactcctccatacagaaccgtggcaacctctgctgtgatcagggcagatcctaagagtttcatctgaggaacagcatagcaatgctcacaggcatatacccagagtggggggcaggagtgggggcggggggaagagaccagaaaaaagatctaaatttttgtgttttctttaccacaattagaaaagacaatgtcttcctgttagaatcagagacagtgggggctacacagtactttagagatcatccactgtgatctgtttttcaacctgaggagaaaagcctagtgagggggttggttgtcatgcccctgtgctgaggaatagatgcccagctcatcttcacagcatgatgctgcttcgtctctgttggtgctatctctggccacttaagagacttggaggtgaagcactcagaaatcactccatagggaactttgttctgcagacttccgagcaaatgagaatcctaagagtcgatgccctggatgtttttacaggaaagacagccaatgccatcagcatggccaagttctacaacgcagcctgcctgaacattgactccatcgtcttagaagccctatcagacaccaacaacatcctagggattcgggcccgggagctgtgcatcagagctgccatagagcagtccatgagggaagcagaggagtcaggtaagatccatgattgcaggtgtgtgtgtgtgtgtgtgtgtgtgtgtgtgtgtgtgtgtgtgtgagtgtgagtgtgtgtgtatgtgcgtgtgagtgtgagtgtgtgtgtgtgtgtgtgtgcgtgtgtgcgtgtgtgcgtgtgcatgtgcgtgcgtgcgtgcgtgcgtgtgtgtgtgtgtgtgtgtgtgtgtgtgtgtgtgtgtgtgtatacacatgtaagggcatgtgcatgttaaagtcaggggacaaccttgggtgtcctacttcagaggctgcccatctggtttattgagacagggtctctccctggtctgaagctcactggttgcactaagctagctagtcagtgagtccccaaaatccatctgttttcttttccccagcactgggcttacaggcctggctgtttatgtgggttctagggattgaacttgggtcctcacacttgcatagcaagcaccttccgagctaatctctcaccttgggacctttacggggaaggccattcttcctctatgcagctttctgagcgtcctctcctatagcctgctctgaggctgatgtgtgacatatagctagaggattctcctcttcatccagcatgcatgcagagctatcatcccctgaccattgcaggtgtgtgggtgacatagtagaaaagcagaccaggaagagctacaacctgtatattaaggttggtgtgacacttggaggggagacaaagatgagttcactcgacaggagaaaacacttacaaccataaagtgtttggtgtccttgagagagtaagtttggaactagaaggttccagcacaggtgatttggggaagtcttcacggaaatggactttgaagattgggaaaatattaacatgcaaactagagacaagggcaagaccaagaaatcacagaggttgatagtaaatcagaggtggaaaggctggttgtataaacagatcaattgtaataagctttgattttcattctattgaataaaaagagttgggggtgactgtggtctgtctcctggatgtccaaaagcaacagtagaaaagtaactctcataatgtaaagggaatagaaaagcaggaaaaaatggccttggtccagctcgctctgtgttacatacatgatggaggactgagcagggacactcagggataagcacagagacctctagccacagaaacgaggagagtgacgtcatttaccctgcaaagaatcctgggaggaggaagcataagaagatgggttgaacttttggatctcagcatagagaagcctggtatggtcttcctagtacaagccaagaattctggcttcatccagtcatctgaggaccatggatcaggagaacggagacacaagggttcaaagcaggggatctgactagagctggatcctctctctgtgaacagtcctaacaacatgacacagttcctgacagcaccccacacctgctagttgatcaactctcaattcctccgcttgggatgctcatggaacacaaggttctttactggatagataagagaaatggttccttgggggaaatcccagacaatatcataactctctcttaaatgtgctcctgtatctaataaactggtggtccatgccattgtgttagcattccagtggtcatgccatcatgttagcctcctagtgattctttccatcatattagcatcccaatagtctatgccattgtgttagcatcccagtggtcatgccatcatgttagcctcccagtgatccatgccattgtgttagcatcccagtggtccatgccatcatgttagtattgcagtgatacttgccactgtgttaagcatcccagtggtcatgccatcatgttagcctcccagtgattctttccatcttattagcatcccagtagtctatgccattgtgttagcatcccagtggtccacgccatcatgttagcatcctgttagaaatgatagatttgagcctctgaactgagtaccatcaagctgaaggcaggccttggggagtccatcagtgaagtgggagctgcagacactgcagagatgcagttgtcccagagaagaggggaactccctcgagaagacttgcatgttagcaggaagaactggaagagaagtcggaggacagttagatgcgggtagggccccaaaggaagacactcagcagggccggtagtagggaagaggagagagaaaggggagagaggtgaggcttccatggcctctgccctccttgccctcctttgctctagtaaacatactgttctcactttatttcattttgtgctatttatctatttcacagtttttatgcttggcttagctattgacctatccatcctcatgtaataggttatataaaatataccactgtagttgattttattttatttttatgtgctactggaaatttttttaaattacatacatcattgtgacagcagtggtttggatcattgttcagaaaaattgagcagcgaaggggacggggcaaaatgatgacagggcacagaagagggacaatgacgaaagaaagaagaaaggaaaacagaggaagaaaggaaaaaaagaaggaagttatgtattcaaatgaaaacttttgttatggttgtgtctagctgctcttattgaaatatggagggtgtgacagaagagaaacagctagaggctcatggacactgtaaagagactgtatgatcagtggatcacagagcaggcaggagagccagagtccatagtgaaaaatggtcgagactgaggggagatgctagtggccagtgcttctgaggaagctgaggggagcaaagcagagatgttgggcctggtgaggggcctggtggagagtctggtaagttagaagactagcacccttcataactgctgtagaactcagctgtgactttttccactagggagttaggcgtccctagtcctccagcaggtgcagtgtggcttttctgtacatagccccaaatactgggagaggggagaagggaattgcaggaaacgataagccagcggggaactgtagctatgagggagccctggagagttatacgctgagatgattggcaggagcattgaggccgagtctccccgagacctagaggaccactgatgttgcttggcttatgagacaaagaatgtgtcctccacccctggtctccttcaggggtgcccagcccatctttgaagtcagaatcccagggggcacaatgagacagggcaaatatgtcaagcaagggggccataagacgactctgaggctcagggctggcacaaaggcactctagcaagtgcttatctaagtagattttaactgaaattttagaaagtgggttatttcaagagggagctgagaaggtagcagtctgcttggaaggagaatcaggaacaaaacggagaaaataactgcatgagtgaaggtcccatttgctaataaccacatacttcttgtttaattcattcttcattagagttggttctgctgagggcagaaaaaactctgccctatctgctcctcgaccttaccactgcccaaaagctcagaaggttaagggtcagattgtcaaggcaaggccttagtgcacacgcaacttaagaaacccttggcttctgggccaagaaagaaaatgggcacagacggttataagagctatagaaaagatgggcaatatggtagtttgaatgagaaatgacctaacacacacacacacacacacacacacacacacacacacagctcaaatatttgaatatttggtcccagttggtagggaccaaaataaaaactaaaagtctataaaattgcctttggtcatagtattttatcacaactattaaaaattaaaagtaactgatgcaggcacaaaagagctcaggaccccaggggagccatcctctgatactcagtgggtggagcctcttcttcccgcccaggtcagtcagctgtatatgaagattgctcagtattctgtaagagagtaacataggctgcagtgtattgtcccccactgtcctttccttcatatggtgacttttactgaaaccccaccttcttccagcagctcatgagtcttcaatgacccaaaatactgtggtaccagcacgactaagcactgagaacttgggcaggtttacctcagagctcactctaataacccaggaatacaaagttccgaagaccgtgcgcgggagtgtgatgctccccaaaggcaaggcggacagccactttactgggtctcagaagcagcatcaccagcaccaatccgaaacaccgcaggtacaggtacgcagggatccctggaaagagggttgggaatccttcctcccccttcacagcatcctgcggccaggccagcaccccgtggctgccctacaccactccttcagaaactagtacacagccacctggtacccagtaagcactattctattactggcaccgcactggatcccagagggatgacagtgacaaaaggaaggtctcccactcaagccgcagtagtggcgagtcgacgaggaagccgatcatgctcacaaattgcctggagcaaaacggtgacaggagatagccacaagagaaattcggttgaaccttttagaatctcataataataataataataatctcctatgactcaaacagtacaagaggaacataaaggattgtcctattaaaataagtggtgctgggctgtagggaaagtcggtgtaggtcataaagaagtcatttggccccagccacatgctggggaatgtaaactgccatcttggcaaaaacgccgtgctaaaggcagagacatccaatgaaatcaaggaatgagcagtgggtagagagtgagggccagtgagtatcagcccttgagatgtgagcggaagggctggaaggacttgccagggaccacgcccaaggtcaagtgtgtggtcactgggagagaaacaaaggcaaaagtaggaagcaggcctgaaatgaatgcagccccaggggacttgtcacccatggtaacgtctatgttcccaagccacgtgttctgctcagaatagaccatattatcgtcttcttaaagagcaggaagcatgggtggatggtactcttgcaaaatgtaaggtccacacaggaagagatgagatcccaagagaaaaggaaaagggttgatcagttaaaagataactccctctgggatccataaaggttcaaaagaagaaaaagatacagctaaggataggagatgtgagatggagggtggaagttggggaaatcttaccctatcactcttgtatgtatgtgtataggaggtatggtcttttataggaggcagtgaggagtttggggttagaggctgccttccctacaggggactggtagaacacaaatatctccactgtcacaacgggacccgaaactggtgctgcataaagagagagttgagaatgccgacggcccaactaagactagaacctcaagttcacagttttactagttcccccaagtggcccctggcaggcctcattcagagacagagaaacaagaagttgtcgttggagcagaggaagggtatgctcagaactaggtacaaggcagttcaggtggcgtcagtaagaggaggccagccaaagtaaagaaagaattagaggacatggagggggaacgggaagatctgagggtcttcagaccctcagtcttggaatcacgctgcctaggcaccaggtgtttcatagtaggtatctaaggtggacagagatagctgaagatccttatagagaggagatacaacaggctcatagaacttcataaaaagaaagccgagcattaaattaggaatgcaggttaagtaaagatttagctcctaacaggaatggagaccagaatatagatgggacaggtgaatggagcaatgtccgccctggagaagacacctacaggtggacggagcatctcaggggctaaactggtgcccaacaaggtcttttatctgcacctcccctataagtgcgttttgtgttcatagtaccttgtgagctggagcccctggctcgttttctttgggagccccagcctttaaccctcttccctgagagctatgacattctttacaccgatgctcgtatttgttaaaaatagggcatcatggtaagttttgcttgttttccttctatcaatctagaagtaaagacttttagaatgttttggggacagcagaaaatcccagttctgactctagctctctctctctctctctctctctctctctctctctctctctctctcagtaaacagtaaccctaaaagaagtcagagtagaaatcagaacctgtataccacatgtatacatgtgcacgagctcacacaaaagcacacacaaccctgcactgctcaacatgacaagacccaaatgaattggagacagattctgagctgatcactctacccatctatacatgtgcactggttcccatccctctccctcttattcaattcaggggttaaatccatggtccttgccctccttttttttttttttttttttttttttggttttttggttttttgggtttttggtttttccagacagggtttctctgtatagccctggctgtcttggacctcactttgtagaccaggctggcctcaaactcaaaaatccacctgcctctgcctcccgagtgctgggattaaaggcgtgcaccaccatgccccctccagctcctaactcactcttcagatccccttctctgtttcctccaaggaccacttcctctgtctcagtcgcccctgatctccttcaccagtcccatccagacatccacctgccttccaatattccaccaccaccattgcttaccagattccatacacgctgaactcccgtgtgctcccaaatcagctcacgcacgcagctccctcacagagacagttctcaagttcttgtctcagtctgccatggttccaagcttatatgatcctcccgtgattctccaccccttcactgccccgtcattcccttgccctctcacttccccaccacacgcctccctgccgtgaatattaccggttcctgggtaatgcgctcagtttctgtgtctcccgtgagagtggtaagagccgtggaggcagcatcaattgctggtcctgtttgttgttggatgcctacctagtccacaaggagggcctggtgcatgatgggaactcagtaaatatctgttgggtgaatgggcagtcaaatacaggtcaggacacatacagagaacctcccacagtatccctgcttgaagctaccaccattcctgagagtgaaagaacctagtggggaaacccccactcaatttccgttcggcgtgcacccaagaatcatgaacagacgaccatcttgatgtaaaagcatgaatttaatgacagagtttaatgacagagtttaatgacagagctccgggccgacacatatctcctgcaggagacagaggtgtcgaccacatggtggagccataatggcagagctctgggtcgaaacgtatctcacgcaggagacagtggttttgaccacgagtattggaagctaggggtttttatagaaaaggggtgggactgggggaggaattggcgcggtttcacatgattggtccatttaaacatcaacagactgttagaagggcaggagatagggaggcactaggccagtcaggacatgtaacgatgggcctgcccaggcatgtcctgacctgttcttctatgttctcaggcccaggtttcaaagctcacaaacaactctttaggctatttgacataaattacatgaatcacatgtctcaagttttatttcctttcaagagaagtagggaatcatgccatttgaaatatagtcctcattatttaaggagcctgcaagagttttgtggtattattattattattattgttattgttattattattattattattattttgtgtgtgtgtgtgtgtgtgtgtgtgtgtgtgtgtaggctacattgcctgtatgtatagttgttgagacataaggctggcttttgacttcctgcccttctcccactcatcagatctcctctagccctctcctccccggccccacccatcggcggctcagcgtcagcgccagtattggcggggagaccgggctgatgagctgcgtgctcccagatgacctcctcattcagatcctggctgagcggatacaggtgtgtacacgcccacccacacaaagcagcaggcttggaactcacacactgaacccttgctgagagctgagacgctaggccatcggcccccctcagtggctcagagccctcgggactcaaagggtcccttgcttgtcttttgtcgctctcgcccatgacctctgtctgtcctccagttggaagctactcttctttttaaagaaccagggagcaggttttacaccaaagaaataaagcaaaaagagcaatgtgataaaaagtataatgtgagcagctggaagtccaagcttgcctggcacggtagtgtgcacctgaaatcccggagctcccgacgctggggcatgggattgcggaactcagaccaggctgggttgcataatgagatttttgtctcaaaaataaaacatgggtctctgtaaattacagattaaaaaaaaagttttcataatgtaatgtgaaacagattaatatgtaaagcaaatttacattttatatatttgcaaataatgtcacatgcattgacaaaaacctcctacagtgtgagatcagtgttactctctttggttagtaggtctatgggttttacatctccttttatctttctcaattcttcttaaaagcatactgcttttaaggtcaaaaccaatgtgattttttttttaatgaacttgggggtctggagctgcagtccagtgaaagagtacctgcctggcttgcttaaggccttggttttctctccaggaccacgtggacacatgaaaaaactacgtatgctctggagtcacgaccagcaaggcctatgggctcccagagctgtgtgtttcctttagtttctcataccgggcagctattaagcacatttctttcatgtgtctgtgtgtatagggtgtgtgtgtgtgtgtgtgtgtgtgtgtgtgtgtgtatgcatgtttatatctgtgtgtacatgggttagaggccatgggttggaaattgatatcaggtctcatcttcagttgttcttcacttttaatttatgaaaatcaggtctctcacaacagacaggagttaatctggctcatcttgttagccagattattgcagacatcccatctgggcctcccaagtgctgggattacaagcagcccccacatgcctgataccttcttgggtgctggggattcaactccatccttcatgccgggtcctggagtaataccacattgcaggagaaaccgttcttcagtggttgcaacaccaagatcattacagtccagttatgttgccaaagtcattccactccaaggcagtgagtgggctgctaagaaaagtacaggcctgggagacaacttagtggcaaagggtttgcctgcattgtgtctcccagcaggcacctcataaaaatctgggcatggctttatatatttccaatcccagatctgggcagacagagacagaggatccctgagactcactggccagacagcctagcagaattatcagtgaaccccaagtcctaaggagacaccttggtttcttgagagggagagacagagacagagacagagacagagacagagagacagagaaagagaggagagaaagagagagagagagagagagagagagagagagagagagagagagagagagagagagaacagacagacagacagaggtacagagaagagagatggacagctgtcaaggaataatacccaaggttgtcctctggcttccacttgcatgtgcatgcatgtgcacctgtacacaaacatgcatacatacctgtgcatgcatgtacatacacaaaaagaaaagctcaggcgggctcttgctgccggattccccactcactgtgagaacccttcccttttctctccttcccatcttatcttcagacacctcatggagctttcgagaccttttgatgttttctttgttcctttattctacacacagagatggaataaatcctttgttcttcaatcacctgccattacactcttgcataaacgcatcattaaggcatttagtcttcgtttacactgggggggtggggtaggggtgggggtcagtacattccataaaaaggacctccttcatttcctgtcagtgcctggactttggtttcctggtgtttattttggagcccagtgagtatgccaaacccgacagaagaaaaggcctctccgcagagaacagctgtcaatccaggctgaaataaccatctcgttcgttctctctgcccgcagctgagcaactgtttcagaggcgtggtgttcgacggcctggacacgctctttgcacggaatgcgccctctgccctccactgcctgctaaaggccatcggcagccgggagcacatctatgtcatcaacatgtctcaggattatgtcgtcatgaaagcccaggagaaggctaaaaaggagcaagaaggcaaggccccgctcctccctggatgaccctcctatgcccagtaggactttcctggccatggagccctcacagctttcaacttgttcctctggtgtaacaatccaatggcttcaaatgacatcatgaccttgtgtctctctagcaccctacctctgtcctgggaagtgacctggtcatgtatttctaatttcaggcaggctaaggagaacacatatggggtcatcccagcctaagatgcttgcttagcttgctggtttggcttatggccaccatgctgttcctttaaaccaatgggactactcggtatcctttgggtcacctcatcctcacccctgaagattattgtccccattttacagatgaagagattgaagccccaagataggaaaggtctcttcaagatcacacagagaaacgggatggccctcagtaggtgtaggcagaaggcttgtaagctcaaggctaacctggctgcatagcaaggctacagtaaattctatatactctgtatactatattactatactatacctatatatacactatagtatattcagaggagaactgcttctatcattacctcaatagccagcaacaacaacaacaacaacaacaacaacaacaaaaaacccactaactagtaattgaaagatttgattgaaaaatagataacaaggaccagaaagatggttccacaggcaaaggtgatggctaccaagcctgatcacctgagtttaatccctggccaccacgtgatggaaggggagaaccagctcccacaagctgtcttgtgatctctatatctgcatcgtggcatgcataaacacacatacgccctcagagagagaggggggggggagagaatgtatttttaaaaaaggaaaatagatacaacaatatagaaataatctcacttgaattattattaatttagtcagaagcagagcagagaagcacggcgtgtgggggagggtttgaggacctctgccaacactgtccccagaagttagagccatgccttgaggaccttcgggtcctggtacactactttccttcgcttgggctctgctctcctggcaccatcgacacagctcataatcttgaagtgggggaatccttaaagcagacttcatttgtgaacaggactgagtctgcttcctcagcttctcaccaggatcagggaccaggctcccttggaagccgctcaccctcctccctcctgataacctagaaccctttccgagaatgattctcttgaaagagacggcttttgttttccttgatgatcttggaagctgattctgtgtctctgacacagagtcagtacctggtgaggactagcctgtggtcagactctgtcttcttgctgaaccttggcctggtaggaagtgcttcctccctcaggcctcattttaaaggacaccagtcccattcaggaggggcccaccctcatgacccgttcctctcctcagaccacagtatcgtattgaggattaagtttccaccgtgaatttagggagacacaaacttaatgacttgaccaatctcctaccccctagttatagctagaacacttttctataatggtcagtgtgaaagaaatgtgccacccttcccccgccccctccacacacacacacagcatggtcattgggctgagaatctgtatcgatgtgacagaatcagtgtctactgactctcttcagagaagtcgtcaagattacgaacttgatgatttgaaataacgtgggttcattccatatgctatagttctggggtcaaaggtcttgaagtcccagtgtcaacagtattgtgggcctttgggagccgtggtggggaggaatccctctccttgccttttatagctttcagaagcttcctgaattccatgtcccttccttgaagcccccattgtagaccctctgcttcttgtgtcacatttctctgcttctgctgtcagccctctcctccgactctctcgcctccctcttacaaggaaccttttgatgggactcagccacccagacaaccttattcaattgcatctgaaaaagaaaaaatcctaccccacaatcacaagtttaaggattgaaacctgagcatctttggggaccaccactcagccaaccatagatggaacccaaacttggcactatagagatgaagggagaccatcggggactgggacggccatctacccccaatgccacctcccgctgtcgctgtgtgggcaaagttcccaaggctttgacatccccttctctctgttgactctacagagaacaaacgcaaggaagccctggcaaaggagaaggagcgtctccagacactggacgaggacgagtatgacgccctaacagcagaagagaaagttgcatttgaccgtgatgttcggcaggcactccgggagagaaagaagaggtgggaccaacggcgggccagagcggcactgtgccctggggaggaactcacaggggagaccagggtcggtagggtacatgttcagttctgagtcatcttccaaaaaaaaaaaaaaaaaagcagtaacagcagaacacctgaagggatatctgtggagggtgggagaaaaccatgtggttaatccaggcctcctgctgctgcagactttcagagtgtcttctgttgtcctctgctcccttcctgctggggcgtttgagaggatcaggaaacttctgtaatgtcatagctagttctcggaaaggacttcatatccctgtgtcctctcaggctgccctagcagatgaattctgcataggacgtgttgtcctatgtgcctaggggtctgcagcttgtgacccaggagccactctgttgacaggagtatagtgacctagctattctcccacttcttaagcccgcatgtggcaggctacctccaggcagttcctcctgagactcaaggcaagctcacagtgaaaatgtacagccagccaatgtcctcacaagggtctgcacaggaactagatccctccatatcgtgtagggctccagaaaactggagctggaagctcaagctacctacttcacagtcttcagacatcacagacctgggcagtgcccatgtaccctcaggggtttagagggcacagagctatggtactcagctacgatataagcccattttctcttctccctctgcctccagaccccgctctggaactctgaaagagattgtccatcccctgtccccacttcatctttgcctataaataggagaaatgtttattcatcaagaggcatggcaagcttagctttggggctccaggaaacacccctttatcatcaaggctgcagcacctactgccttcacgcatgcacttcatagtgcacgtttgcaccccaaagtttaccgccaagctgtttgtaacatgaatgtacacacacacacacacacacacacacaccctaaaggatgtagacagagccttagggagcagtgagtcacagcagccaggaacaacttcagattcacagagatgaaaagagataaatcagagcttcctaagttttttgtgatcttgagttctttttttgcctaagaaatgtttacctggttaggcaggtggcgcacgcctttaatcccagcactgaagagtcagaggcaggtggatctcagagttccaggacagccagggctacacagagaaaaatgatcaattaatcgaaattataattatgaggaagaagaaaagaaatgattacatgacctcaggaaatatagataaattgatatacaacccaaaccttctctggtatcagaataagtcagaataaaatttatttaaaaaaaattctttggtatacatatagttttagtaatttattaaatacagaagtgaatttgcataactaacgagatgaatatactttttctttagagacagggtctcactgtatagaccaggctggcccccaactcaaaactcccagagatcctcctgcctgtgcctcacaagtgctaggattaaaggtgtgcaccaccacaaccggttgcttctttatttttatgtaaagaattaaatctttgatactgaaggacaaagagcatcttcagcacttttcaaagttggtaaatacttttcctttataatcataaatgttgggaacatgccttcacataaatatgtaggacaaaatatcaaaagtctgattgtttgcttttgtttcccaaaaattctggaaattcggccctaatctcaagccaaaattcattttaggcttaaaaaaaaatgaaactcaagtcagaaatagaacagcagtttttaaaatcaaacattctagctcaatgatatactaacttgacactttcgtgccaacacatgactaggaaaatatttgaagtctttcctttccatagttaagccattctgtttctataaaggcagaaatcccaacacagttaaaaccctgcagctcacaccaaacatcatccagtcggggccagggcgtgtcaggcagtgttgattggttttgtacgcatggtgtgatagcatgcacagcacatggtgtgttgtatgtttagaaccaaagctatgctaggcacaatggcatccacctttaatcctggcaccctggagactgaggcagatagatctctgtgagctccaagccagtctatattctacacggtatttgatatttaattaatttttaactattgtgcacccagaaaccttgggctgttgccaattttttcacaacccccacatttttgttacataaccccatcttgtgttcagcctttaaaaagctgtgggttagataccttcagaagtaccatctccttgattttatatatatgctgtctgctttgatgcctctgtgcaactaacagtcctggcaaacatggttgatagcataggacaaagggcaagaaaaacagaaaaagaggagtggctttccagagcccccatcatggctctgagccagctgtggtagggaccaacgttcaaggcacagcattccttcctgtctgaacgtcaaacatgagcacgtaggaaagcatgcctgccccgacaccatagcaagagcagccttgggacatccttgctcagtgatgaatcttattttcagcctttgtctttctctcccatgaagagagtctggactagaaatacagataagtttttttttgtttttttttttttaatctaattgcgtttaactcatcagagatttgctgagtggcctttcaaagttagttttggcccctttgtttcattcattcattttttaattcattccctccctttctccttccctctctcctcttcctccttccttctctccttccttccatcaaagctctgtccagggtccctcctcctggcagtcccagcttggcgggtggaacacggggtgctgatctcacggggtctttctggctctggcttgttgcagggagctggaaagacttgccaaggagatgcaggagaagaagctgcagcaggagctggagaggcagaaggaagaggatgagctaaaacggaaggtcaaaaggcccaaagcaggccctgcggcaaaggaggagccacccctaaagaaagcacaaggcgccacaaacaagcaggtagcagccattacttgctccttaccgagaagctgactaaccagctatgcctggttactgtcccggggcagaaggtggccaagcagagcccagggttagacatggctctgccacctgacacatcctctcacaggagccctagtggggtgctgggatccttacttttaaggcagctctgacaagtgtgctcacgtggccatctcgctgggctgtgttcgaggctgggtgagatgagagaggaagccagttcttggtcactcaagactccacaccagaagcaggcctcaatttagttgggaagaaggacattggactatgtcttgcaggggcgttagcatgagattggactgaacttactgccccctaacaacaccccacaaagtgatggaatgagctaaggatttcatccaagacaaaaagacaaacaaacaaaccaaccaaaataaacaacaaaaaacaaagcccacaaaatacgtgttaaagcagagtaagaaaaggaggtgagggttggttgctgtgtatcaaattcattgcataaataagtatttttaaaggtttcttttatttaatcacataatttttatctttatttactgtaataaggtcaataaatatatatgtgtgtgtgtatatataatatatatatataatttcttgccagtaaagtctttacctttttttgtatctttttaaatttttactggatattttatttatttacatttcaaatgttatcccctttcccggtttcttttaaagccaaagtgtgagcagattctaaactcccatttgtccctagaaatacaatacaaagctgtgtagttctaatagcttcatgctgaaagaccccttgctccaggagaggcactgttgcaaatgccttatatcagggtgcatactttagtcattaacaatccttggatgtgcctattaactctccccgctgtgagccaccatagtagttgctgggaaatgacctctggaagaacagtcagtgcccctaacctctgagccatctctctagctctactaaaccccactatacagagaaagggctaagttgtcagcagggtcccaaagctgcaatactgctgggcttgagcccctctctctgccctctcccaggacatcggaaaacaggcgcagaagactgcggtttgctggcctttccatattggtccttgagaccagcagccctggcgcagaagcatgggttaaagtggctgggcatctatctcaaaattcacaaggctacaatctacaatgtaaaaccatgaggcagacatttcactgaagctccccacattacatacaaagtaattccacaaactgactgcaccgaaggaggctcctgaatcctaggcctcctggtgaaacaagatgtttctcgtcctgcatacggttttgcttgtcttcaataagctgtttgacatgttatttattcattttgctttttagcttgctgcagttgccaagatagaattaaagatggaatcaatagaaaggaaagtttctgtcagagagcacgcaacacttgaagaaaccaccaggaagaagaaagccatgaccgaatacccactcttaattccaatttcccaagaacaagaggacagcgaaggagacttcctgaaggactctgacaagaacctggcacaaaagtttaaaatctacgacatgtgtctgaaggatgttcaaaacatcctcatgtattgggaccgcaagcaagggatgatggtacctcatacaggcacggacgagatgtcacatgaggctgacgaccagcgccaggcgccttcagggggcgggggtcgcaagggccgcaaggaccgggagagggagcgcttggagaaagagagggctgagaaggagcggctggaaagggagaaggctgagagggagcggctggagaagctgaaggccctggaggagcggagcgacgtggaaggggaaggggaagaggagcatgaaggaaagaaggatctcggggtgccctttatcaacatccagtctccagacttcgaaggtgtaagctggaagcaagctctggagagtgacaagcttcccaaaggagaccaggtacaaaggcttctgtggggtaaagcaagaagtgagacctagggaccacgctaccatgaatacagctccgtatcgaagaatccacaagccctttgactcatctctgatacctccttgggtacagggcaacaatagctaatccatagacagttccaccagtctattccatctctttggcctcattaaaagccatctttgcatctggtctttaatattgacaacactagttccccggggaaatgagagacatgctttggagtcaatcaaaaggcttctctattccaagatttcttcctatgaaaactttccattgggatgggaattaatctgttcggtaggcagccttttactgccaccaacaaaagctgtgtgccttataaagtaacctcaactggtggtttaggggaaggaagatttttataatagatagatagatagatagatagatagatagatagatagataagtacgtacatatataatatgcatatatgtgttttatacacagtgcatattttttatatatactttttctgtaaagcattagaaagtaaaattctagtctaaaggtcacacagtttttcaacaaccactaacaagatacaatggccttggccatgtttcaataacttttattcacaaaagcaaacagcgggccaaatttgtcaaagagcaggcagggccacagtctgctgacctctggctcaatcagaaattagacagaccagttagaactgacgagatccctagagggaggcatggcaggaggagggtaaaagtggtcctaatgagtgtcctcacagcctcacccacagtaggtcggagggcggagccgacgaacacaccacaccctccctctatctacatagtgcagctcacaagctttgtttcagaccaggcttaggtaaagaactgggggagtggggactcaagaaatccttccctccttatccagagccatctcttgtgcagctttgtaccctccaccttctgactctctcaagtagactattagtttaataactggtggtaatgaaaattggttgttaatttaataattacagctttctccgtggacactgtaaaccctaggaagcaactccagttccatgtcaggatgctcggtggtccacgggatgggatacataggttacgtggaggtcttgccctggtaggcctaccaggccactgagtccaccgtacaggctatgggcatctccggtgtgggtgacagtctagacactgaactcctgtatgctgagaaagaacctgctgcccaatctgcaggcccttgctctgaagatgactcgtgtattatagtcatgcgtctataccagagtaccagagtacagggagagaaagccccagaaactgacctttgttttctaggttttccctcttcgccgtatataacctgccccagtcccagcgtttgcttgtttttggatagaaagaacatttaaagaaaaaaaaaaaaaaaaaacacgaactatgagaatggatgaagtagatctatgctacagacatctgaaacttaggagttggcctgtttaaattaaacagtcttgtggatggcaaaggccatctcctgtatcaacctggttcctgtctgaatggagtttatagccccatttgcaaaggcagacaaatggtcacaaaaaagggtgacgctggctatgagaaatacagagcatacacatgccacagcaaagagcctccaggaccatgtgacaggtctggcagagccaagtcagaggagggcagggaagattgcatgggcacacacacacgcaccccgggttcattctgacaggggtgtacagttggtgcacaatctgcacaggaaactaatgcaaagcctttccatttagatcctggacatcctaggcctggggtcctcaggaccacccatccctcctcccgtcttgttctccatcatctcttacccagcaaagcggcagtctttggtcgccacggagatcctaaagcactttgtgtttgtgattccaccaaacgatgacatccccctgatggacgagaaaaaagacccggaaggagattcagacatcttcctcaacaccatcataaccaaggtaaaggacctgcagctggtcttcacaggacatggaagaaaagccacccccacagggacacaatctgagtcaggcacaaggcttgtttctctggtcctcctgcccaaggagccttcacgaacctctcagtgagtctcccctgtgtctacctaggaggggactgaaaataattgctactcctcatgtcccttcccaaatccctaggggacaatttagaaaatatatcacatggttttgaagctcatatgcaaaacagtaggcaaaactgttttttttattattattagtgtgcatttgtcgtgccaagtgatggagttcatcgtgagcgtctgtccagttgcattgtgtgctctgaccatggtcccgatggtccctcctgccctctcccactaatccccctcctctcccaaatagttcccttcccatttccataccatgtgtgtgtgtgtgtgtgtgtgtgtgtgtgtgtgtgtgtgtgtgtgtgttgataatgcatacatacagcatagtttctatacacgagagaaagggtgaggtatttgtttttctggttctggttttttccacataatggtttctaatcgattccattcattttcctgaaagtgacacaatttcactcatttttatagctgaatgagactctgtgtgtgcgtgcgtgtgcatgtgagcatgtgtgattttcttttcccgttcatctgttgctgaacacctaggctgactacacacagcttggctgttgtgaatagagccacaataaacatacatgagcaagtacctctgtggtgtgttgacataagcttcctttgagtacattcccaggagtggtagagtgggatcatagggtagtggctttttatgttgtttgtgtgtgtgtgtttgtttgtttgtgttgaggaacatccatgctgatttccgtgatggctgcaatagtttgcatttctgacagctgtgtagttttaatgaatctccctgataagaggtggcttagtcggggtttctattcctgcacaaacatcatgaccaagaagcaagttggggaggcaagggtttatttggcttacacttccatactgctgttcatcaccaaggaagtcaggactggaactcaagcaggtcagaaagcaggagctgatgcagaagccacggagggatgttgtttactggcttacttcccctggcttgctcagcttgctgtcttatagaacccaagactaccagcctagagatggtcccacccacaaggggcctttcccccttgatcactaattgagaaaatgccttacagttggatctcatagaggcacttccccaactgaagctcctttctctgtgataactccagctgtgtcaagttgacacaaaactagccagtacaagaggttgttgttttgttttgttttttaccgcatctattgatcatttgtacttggtcttttgagaagtaacttccatttcatttgcttgtttattggttggagtttggtgggaggtgttttaatttctgggtttttcatctactctagatagtaatccattgtcagatacatagctggcaaaaaaaaaaaagtttcctcttgtcccatgagctgtcttcactctgctcatggcttcctgtgctgaacaagcgctcctgagtttcaggcagtccagttgttagttcttgaaatgatttcctgagctgttagagtctctttccacccctgcctatgtcggtatcttaaagtgttctgtctgtccttccctttctctctttcagaatttcaattcttgcattgaggttcttaattcattttgaattgctttgatgaaaaagatgggtgtagtctcatccctttacacgtgggcacccaggggtttttagcactgtctggtaaagacaccgtctcccctcaatagatggtcttttttttttttttagatttatttatttcatttatgtgagtacactgtagctgtcttcagacacgccagaagaaggcatcggatcccattacagatagctgtgagccaccatgtggtggctgggaattaaactcaggatctctggaagagcagtccgtgctcttaaccattgagccatctctccagccctcaattgatgttttaacttacattatatatttgacaaggttaggtgatggagtcacatgggttggttaccacgctctctagtttaactgaccagcagcgttgctctttttcctcatgaatgctttggcaaaccaggatctttgtgcttccatataaacttaggattgtccttctatcgtgtgactattgtcctcagagtttcgagaggggttgcattaaatccaaagatagctcttggtagtgtggcctattgtcacaatattaattctgacagtctacgagcatgagaagtcttcctagtgtcttcttaatttctttcttcaactcaaactagcttataaccttggtgtgtgtgtgtgtgtgtgtgtgtgtgtgtgtgtgtatttgtgctccttcccaaaatagtaagagattcttttgagtcccttttgagtccttagaacaaagagaaggcgaaaggaaatgatggggagtggactgtaccagtaaaatgttagccatcatgtggcaggtggccggaaaacctggcccaggcaatgccaaggaagttgaatgcccagctgtctatggtgggaccctgccaggagctgaaactcatcccatatgctctctctctccccgcaattgctgtagcatttctgcttcctccttgagggaacagagtacccatagaatcactgatcttgtcactaactcaggaaactgctggccctaccctttcctacgaccattgctcaccaaccagactgcagacatgccctaagcacctctgtctttactgtgtgcccgaagtatttaagcctttgtgcccgttttgaattcaggctcaagaggaacaaccctctccacctaagggaagcaaacagaaattgaaagacaaaccagagcaagtgcgggaaactcagaaggaaaaacgacgcacttactccagcaggaaaggcctccctgggggaacatcggggagcattgttccgatgtctgacatagaccagaacagctttgatggagaacactcccaggagaagttcatcaggtaggccttgcaggaacaagggagagggaggatgaagccccaagttgggagcacagctgtcaagtacaccagagaagtgcagggttatagtgagggagggggcttatagcctgccatacctaaccccagctgtgcagtacctgtcccaagcagttctcctgtcctcttcacacggttactttaaatgtctctacggtcctttcaggctgaatcacttccggtggattgtgcctccaaacggagaggtaaccttgagagtgcacttctcctctctagatgttggcaactatgaccagacgtttaatttcgagctccttgggacccgccgccaataccagctctactgccgcggagtctgcacctacccatacatctgcagagaccccaagtaagtgtattttatttttgaaagaaaaggttggaaagtgtgtttttgagtcactccacacacaccccaaatcactttgaacaagatggggaccaaagagaatgctcagcgggtaaaggtgattcctccaagtgtgcgtatgcatgcgcgtgcttgaaataagggcaacatatttggcatgacaccactgggtatctccagactaaaacagaataaacatgaagttaaaagatagagagaaaaggtattcttctggcaagtgagtctgcatagttaacaattaagcagattgaaagcacttttactctaggatgtgtcttcccgttacacgaacctccctaattttctcatagccactgaacttccctgtgcagtttaggtctcacataaacgcacctcaggggagcaaactagaaaaggtgactccctgctggagcgaggggctttctgtagcttgtcctttgtgtaattctcgcccaggagccctgttttactgaggaactgagaagctgactattatgcactgaaactatttaatagtttttttctagagattcatctggctttttttctattggggtgttctggggcagactatccagctcggccctggaagcctttttctcaagttcaagacattccatcttctcttagaaagcaggggataaagcttccatggagatccccacattagctgtcttcagacatgggagccttcactgagcagggaacgctgggtttgtaggacactgaacgctgggtttgtaggatacacatttgtgtatcattatttttacccctttctcccccatttcagagttgtgttttctcagaggaagaaagacatgaagttaaaagaagttgttgttaagaagtatgttgtgagcatggagaagttttactttgggccactgctttgtggaaagtcaagagacaagtaagtatgtcattatttcaaagtcaattgcaaactttggggttgaactcatgaatactgcaagtagagttcttatatactcgtggcttctattgacactgccccaaactccgaaccaggaggattcaattcacgtgtaccaagtctctgctctgacacacagacaacttggcttcccctttccctcgcgggaaagcctagaagaagacaaggtttcagaaaggtggaatcaagacttcaccttgggatgtagcaagtccaagtcgtttagaagatatctctaggaaccacataaatcagagaccagaatatatggtttgggttctcacaggagagctctgtcaagatgataagaatctccactacagacagtgtgacacaaggagagagggtgaaacaagagactgttctaccaagagcttctccttacccaagaggagtccaaagtagacacagaaagagggccatagaatcccatgagaagaatggacgatcaactccgtcaaatgctacaggaagatggaagtgcaaacatctactgggttcagcaacatggatttcatggggaaatgggggcaggagtccttctgggagagctctggaaattctgcccaaattagcactagaattaacaacagtgattaccatggtccaaagacccagtgcaaactaactcactcactctaagccttgaaccttgtccacaaaaataatgggaagacaacagtgtctgcctcacaggttgggaggaccaactgggtaacaaacaagaactctttagcatcatgccaaattgcaacggtggtgggtaagatgctgaggtcacctcccctttcccagttactcacaggattgcctgactctgatactctgaattgaatctgtctttctctctccttcatcctccatcacagactgctcaaagctgttctcagactgtctcagctttcctggtctgggctgtgatctctgacgatgtacatctcttaattccttcagccttcttcagtggttccttttctgttcgttgcctttaacagaatgtctcccaatagccctgaagcctacctctacagacccatcccaaggacataagggagcagaagcaaccttgtcatatgaacaaggccagataaattcatgtcagaacagtaacagtctatgaaagtgttgtggaagtgaatgagatctaagacagatgtcaagtatcaggtgacccaaatgataatctctcaaggataggtgatcactttcctgggagttctttctaagaactagaactaccatttgttggacatctgatatttccacttgttctacgagctttgagtgcacaatatcacttaataccaatcaatcctaagggatactgtcaccccatcttacagctaggaagaccaaggcctggggagtcccatcacagtatagtagtctcagaagcaagtgaaacaaccacagatgtcatggtctcagtcaaccttccaccaccttagcacagtcacattgccctttcaaattaaactgcacctcaaaggatcctgttacccctgaacactctctctctctctctctctctctctctctctctctctctctctctctctctctctctccctctctctctctctctctctctctctctctctccttataatcacatgcccattcctgttcatctccaggtataagtcatccttgttccctggcaacatggagacactgacgatcctgaatgattctccaatggtggtagaggcatacttctgtttccagcatgacataaaagcaagcacctactttctagagccggtcaacatgactctgaaacccaatgaaaagcaggtacaatcaaaggcatggggggggggggggcgggggaggattctatcaggggcaaggagagtcaagccctgacatccccatgtaaatggaccttcctttataactctctcaccaggcactaaacgtatgggcctaccctactgcagttggtatctttgaagacagcattgtctgctgcatcaaagagaacccagagccagccatctttaagttaagctgccaaggaattcgcccagaaattgaggtggagcccaggcagttacattttgaccgactcttgcttcataggtaagagttccagataactcagggacaggaggggagatttgagagcatttaggtctgaggttatcagctggtcttgagttactttagattttctgggcttgctgttgtctgtctgactgtctgtttggtgtacatcactgggaacggaactcaactcagagccttgtgcatgctaggcaagtaactctgccactcagctgccatgcctcccccagcccatagtttgtcttttcattaaatcaagaaaagaaaaaccaaaggctgtctatcaatatatctgaatttttctttttcttttttttttttgtagaacatgattttaacattttcaacttaatattcaacagacagaataattattttaagatatatttcattgttatgtctcccttttcatttctgatttttttaatttggatactgtctctgtgctctctggttagtctggctaagggtttatcttgttgattttctcgaagaaccagctcctggttttgttgattctttgtatagttctttttgtttctatttggttgatttcagccctgagtttgattatttcctgcctctactcctcttgggtgtatttgcttctttttgttctagagctttcaggtgtgctgttgagctgctagtgtaagctctcttcagtttcttgttggaggcacttagagctctgagttttcctcttaccactgctttcatcgtgtcccataagttttggtatgatgtgtctttattttcattaaattctaaaaagcctttaatttctttctttatttcttccttaaccaagttatcactaagtagagagttgttcagctcccattgtttttgttggtatttaggaccagtcttagtctgtggtggtctgatagggtgtatggggttatttccatcatttttgtatctgttgaggcctgttttgtgaccagatatatatggtcagttttggagaaggtagcatgaggtgctgagaagaaggtatattcctttgctttgggatgaaatgttctatagatatctgttagatccatttggttgaatttttcatgttcttttttttttttctgtggctctggatttctatctgatgtcactttccttcataattcctttattacgtgtaattcaggaatggcagcagcgccaccactcaaggccggatcaccaaatcatactgctcacaagtcaggagcatcgagccttactcgtgttctgcttagccttttgtcattttgatgcaagctaggtcatttgggaggccatctcaattgagaaaatgcatatatctcactgatctatacacaagtctgtgagacatttacctgattgatggttgatgtgaggaggatacaactcactgtgggcaagtgatcctgggatctgtaagaaaaaaaaaaaaaaagcccgaacaagccatgaggatcaatgagtatgcagcatccctccatactctctgctgcttccctcccggtacccaccttgacttcctgccctgacttctctcagtagagagctgttcagtttccatgagtgtgtaggctttctgatgtttctgaaattcagctctaatagatagtagtctgataggatgcagggggttattttaattttcttgtatctgttgagacttgctttatggcaaaatatgtggtcaattttggagaaagttgtatgaggtactaagaagaaggcaaatattctcttttgtgtttggatgaaatgttgtatagatatctgttgggtccatttgagtcataatgtctgttagctctattatttctgtttagcttttgtctggatgacctgttcattagtgaaagtagggtactaaagtctcccactattaatgtgtggggtttgatgtgtgatttaagctttagtaacgttttttacaaatgcgaatgcccttgtatttggggcatagatgttcatcattgagacattgtcctggtgactttttcctttgatgagtataaaacatctttcctcagctcttttgatgaagtttggtctatttttctagatattagaatgaaatactagcttgcttcttgggtccatttgcttgaaaaaatatttttttcccaacccttttctctgaggtaatgtccatgtttgatgttgaggtgtgtttcttgtgtgcaacagaatgatggatcctgcttttgcatccactctcttagcctgtgtcttttcattgggtaactgaggccattgatacaagagatattaatgaccaatgattgttaattcctgttattttgatggtgtgtgtgctcaagcttcacttgatttatttttgttggtatgaaataattattttcctgtatttttatgggtatagttagcctccttggagtggggttttccttctagtaccttctgtagggctggatttgtggatagatactgtttgaatttgactttgtggtagaatatcttgttttctccatctatggtgattgaacattttgctgggtatagtagtatgggctggcatctgtggtctcttacagtctgtagcacatctgtccaggatcttctggtttttagagtctccattgagaagtcagatgttgttgtagtagtctgcctttatatgttacttgtctcttttttttccttgtagcttttaatatgctttctttgttctgtgtgtttaatgtctttacgtttaggctggaggacttccttttctggtctgatatttttggtgttccataagctcctcgtacttttataggcatgtcctgcttaaggttaggaaaattttcttctatgatcttgttaaatattttctgggtctttaatctagggattcttcttctgttcctattattcttacatttggtctttttgtagtattccagatttcctggatgttttgtatcaggaattttttagattcaacatttccttgaactgatgcattagtttttttctatcatatcttcaatgcctgagattctctctcctgtctctatattctgttggtgatgcttgtgtctatagttcctgttcacttacctaggttttccatctcaagaagtccctcaggttgtatttttcttattgcttgtatttccattttcagatcttgaacagttttattcatttccttcactggtgtgtttgtctttttcttgactctcctggctttctttaagggattaatttgtttcttcccattatttatatattcctggatttctttaagtgatttaatcatttcctctttaagggtctctatcatcttcataaaattggctttaaggtcattttcttatgctttatctatgttgaaatattcagggcttgctgtactaggatagctgggctctggtggtactacatggattatgttcttacactggcctctaagaatctgggtttggggtaattacaggtttaagtgccaatttctgagtttatttttgttgtgtggatgggttttttcccctcagttcccatttcctctctggtattccagccagagtggtcttgtggttctagtgaccagtgagttctcaggcttagtagggtatctctgcaagggttttggtggcctgcatgaactctggggctttgggtgccagtgttgcctctgggactctggggttctaggagctggcatggtctctggggttctgggtaccagcatatccttcagtagagcaatggggcttctgctggagttgtgggccagagtatggagccaaggggtggcttggtgggctgtgagcaaggtctcacctcaggttctagtgtgggcttctgctggagttgtagaataggacatggaggaggaccgcaggggaataggcaggctctaagagcattggtgagctgtgggcaggctcgtacctggggttctaggtacagtgtggttcctagcgaagcagtaggcctccacaggagttgtgggccaggaaatggaaatgagagaagagcctgtttctggttttatcttctcttccctgctattgttttggttgttatttaccattaatttaagacttcttgacttttttaggtagacagtgctgtaaacttttcttttgagaccaccttaattgataaggttttgttttcagtccatttcaggaaataataattttcttgttgatttctttcttgacccagttgtcattcggtggtgtgtggtttagtttccaggagtttgtgtactttccgtagtttccacggcttcatttcattctgttcagttacgatgcagagtgttacttcggctttccttggttcattgagactggctttgcatcctaatctatggtcaattttggaggcagctccacaggctcctgagaagatgtgcaactttgagtgatttggtggactgtttgtcctgtagatgtccaataggtccttttgatttatgatgtcatttagccctgatgtttctgttatttttagttcagacgacctatcagtgaaagtgggtattgaagtgaaccatagtcaccatgttagagctactaatactttttaaattcatacaaaatattttgatcatattcttttccctcctccaactcctcccagaccatccccacctctctacccacccacctcatcctctctggtttttttctccctctgcctctctttaaaagaaaggaaaaaaaacagtaaagaaaaaaaaaacaaaaattgaaacaaagaataagaaaatcagtaagacaaaaaagataacaagacaaacacagggagtctttttatgttgctcaagtaatctgtagctttaaatcttttgtgaagttgggtgtgcttgtctttgatggatgttacatttagaattataatacactcttagtggattttacctttaattagtatgaagttatcttccttttctttgatttgaagtctgttttgtcagatattagaatatctatgcctgcatgtttctgtttcatttccttgaaatacctttttctattctttaattctcaggtactgtctctttttcattatgaggtgtgactcttgggaacaacaaagagatagatactgttttctaatctaatctgctagtctgtgtctctttattaggaaattgaaccactaatattaagagttattgttgaactatatgtattcattcttggatttttttaactttgttgtttcctcaagattgcctttgattggcaggtctagtgttgttcatttactccatgtgatgtcttaagtgtgtttatccttttcttcaaattaattcttccttcccatatcctctttagagttgtttgggtgtctatcaactataaaatgcagatttatttcaagcacacataaaaacatacagctctaagtcataaaacaaggttcattaaatttcaacccaatgacattgtctagggtatattttctaaccatggcataattaaattgcagacagatttctcgttgttggagaaaaagagatttacatgtcatccagtgggcctgcaagatggctcaacacatgaaggcacttatcaccaaacctaacaatctgagtttgaacccaaggtcccacgtggtagaaagagagaacagactctcacaagttgtcctatgacacatgggtgctattgcatagaagcacctatacacacacacacacacacacacacacacacacacaccttttgaagtatatcttgttattaaattggagttagggaattagcggaatcagtataaactcctgggttttagtatacagataagcatagaaatttgtgtgtgtttcctagctctgccatctaggtgggcttggaaacagtggtacaccaggagcactgaggactccattccagatcatggtatttaaacatcattttccaataaatgacaaggatccttgatgaaaggatttctctgggcctgaagcaggtagaggaagaacacttcagatgagctggaattttttgttgttgttgtaccaaaaagagcttaaagaactatatacacataaaaggacataggaaccaattcataagacccaacctcccactagctaaatctgagacagtttgaaagtcaaaataaaattatgcaaaaaattctaatatactgatctataacagtggttctcaaccttcctgatgctgtggccctttcatataattcctcatgttgtggtgacacgaaccgtaaaattatttttgttactacttcataactgtaactgtgctactgttatgaatcataacataaatatctgtgtttcccaatagctcttagatgacctgtgtggaagggtctttctaccccaagaggggtcatgttttccaggctgagaaccactgatgcatttaatgagaaatgtaactccactggcataagtatatgaataaacacatgaaggaaggaaattctgttttgataacagaataccaactaaacacgggaaggtcgatggtgttaggaattgattggtggatgctaaaacgagtgtctgactgtttggttaagaatagggcattgagggctggtgagatggctcagtgggtaagagcacccgactgctcttccgaaggtccagagttcaaatcccagcaaccacatggtggctcacaaccatctgtaacaagatctgacgccctcttctggagtgtctgaagacagctacagtgtacttacatataaataaataaatctttaaaaaaaaaaaaaaaaagaatagggcattgatccaggtgtggtgatacagcctgtagtcctggtaattgacaggtagagacagaagaacctggagtccaaggtcatccccaactaaatagcgaatttgggaacagtctgggaaaatataaggccctatatggataaaataaaataaacagggtatatactcaaagcacctccccggaaagtattaactaaaaaggaaaaaaaaaaaaaaaagcacatatgtgatggagagaccaggtgagcctcaccttaactaagtcatcaaacatcgtagcagcaccaaaaccagaacacataacactaaaggaatctcctgacccagtacagtgaaaaggacacagcttgcaactcatttccctccaaaatagttaagcatgaaaaagcatcagaccgtccaacttaagaaagagccaacagatcaactggctcttcaaaacatcaaagccaagaaacctaaagaagggtagaagccttttcccaaagaggcatgacagttacatgcaatacatgactgtgggttgattccttgacctggaaaaaaataaagagaggtcaagtagcaacagaacagaggccgaggttgaacatggactgcagaccaaataatagtctttatgacaatgaaaaccctagtgtactgtgtgttctcattcttagaaagtgtgtaccaagtaatttaaaagttaagcagtgggcaatgatctgcagtttcattttgaatggctctggaaaatgatgaggaagagagattatatggctacaaggaaggcaaattcaagtggataaagagaattcttacaactcttctctaagttgtagatggtgttaatttgaggtcatttgacatagcttgttcatggggaaacatttttttaaattctttgagcttgatcaaatttcttttggtctctgcaggaaagaaaccaagatagtaattctccgcaatgtcacgcctcttcctgtggcctggcggatctccaacctggaacacctaggggaggactttactgtgtccatgatgcagggcaccatgctacccaagggagagtatgggctgcaagtgcacttccagccctccaaacctgtcaacatcaagaaggccattcggattgaggtgagatgtaccagccctgtagacttgattatcaaaatatgcgtgcgtgacacacacatacacacacacacgggggggggggtattaaatccctcatctgatctgtttcctatctccatcccatgaaatcttactctgcacaaaacacaagctcgataaaagcagtatgactctaagctggtctcttacgaagacagtaaccactcagcattttcctgagagcctgctgctttctccccaccattccatttgctaactttggtgcgggaactctgtcaagcaggatctctcctgaccccgtcaccatctgtactcagactgggtgactcaaaacaacagacctttcctatctcatcattctgaagactagaaagctaaaatcgagataaaggaccacactacctctgaaagaatttttccttgtcgcttctagtttctggggcctatgagtgtgtgccttggctcgtgccttcatccctccaacctttgccttcttccgaaggcttttctctgtcttctcctatactatttcagagggacacaggaagtcctctatactcatgagttctccacccacaaatccaactatattggcaaatgcctgttgaaagaagagatagaaattttgaattaatacttgatttgggggctgaagagatacttggtggttaggaacacttgccactcttactgtggttcatagcaccgatgttgggtggctcataatagcctgtaattccacctccaaggatgcagcaccctcttgtggcctctgtgagcatctgcacccacatgcacatacccaccagcatatacttttttttttttaatcttaagtttagtgacagctatgaatttcccccctggcaccccaaagcacatggaatgcaaacaggtgactttgtttttcaactgtagtcttcaacaagatggcagaggtctccacctagatgccagagtgttggattgcctgtgaagctcttgtcatgactaatggaccctttaatcagctcctggttggtgtccaaggtcaacagtcaactagatagaattagactggtctgtcaactggcaccagctcagtgactgcttggggcagtgaggaaggatctccaacaatgatagcagtaggcttagtgaactactagagatcaggcctgaagatcataatgattacacatctaaaagactgaatttccaaaatagaaacaccaagcatgtattttacttaaaaacaaaaaacaaccccccccccaaaaaaaagccccttttcttcaccttgactcacacagaatagggtcgcttcaatttataaaacaagcagagcaagatgacttaaaatgtaagactaaaaaaatgtgacagcaaagttctcagaaacatttctctgtcacctctgctgcccagtccccaccgcatgttatacggttcagactccagacactttgtgggtctgagctcttgctgaagaactttccccggcaggttttggacgcagaaaatcttgttggtgtcgttcagatcgaaaacatcttgatctttgcagaatcgtatgatatcgctctggacatcaccttccctaaaggtgaactgacccctgggaagggggtgtttatatgtcgtttctgtttgtatactagagttctgggtggagggactctactgtgtcgttcacatgatggtggggttggtgggggagggaacaatctgggtaataggaatgcaagcctagagtgatgttggtaacatcaccacaaagcagtctcctcagtggagggtaacaagggttgaggtccagcctcgacacaggatcggagttctctcctggaagcagggatatctggaaggtgcataataaatagacactgactaattttggggtacaagctgacaggtaatttttcaagacttaaagtttctctctcttctctctcatcctctgctttctttctctctctctatttgctcacagcctgaggctgcacactctgcattctcttgtgcgctctgcttgtctcttgtgtgcttttcctttcttggactctcacgctcatacacacctctgtgcattctcctttcactctcacacacactctttacacacatctctcacacaccacatgcattctcctttcactcacacacactctctccatacacgcctcacattccctcctcactcactattcacattctctcctcactcactcttgacacgctcttctcatgctcgctcaccttgttcttgccccagtcttttattgatattccaaaagcaggttaaaaaaaaagacattgtataaccattgccaattcaaattcaaaagcataaccacatctcacaaagaatcaagaatggcaattattccccaaagtttcaagcttcccaatttccaggcttatagccaaaataataataattgcaagcttatcattatttaaactttaacttattatacttcagagtaaagagctcatagctctgaccagctgcttgcattttcttgtgaatctctaatgataaatgacatgagcaaagctgccaggcagtggccagaaagaatcaagttaacccttaactcagcagttctgctagctttctgcttctgcacattgcacacaatgactctcctaagagtcccagtgttttgacttagtttttactaatataagatcttacatattctatacttgtttatccagggcccactctcaaatgttgtgcacaacttatttcataactttttttcttatttcataactttttatgaaacttgtttcatttaaaaaaaaacttttaatagttttttttcctttctcgaggtcccaatattggctctaattcattttctaatactttcttcatactttctttgcaagtcaaccattgtgcagttattacagtgtttccaagatgagagcacacagcatacacctaggccattagggctgtgctgtgctgtgctgtgctgtgctgtgctgtgctgtgctgtgctatgctatgctgtgctgtgctgtgtgtgctgtgtctgctgtgctgtgctgtgctatgctgtgctgtgctgtgctgtgctgtgctgtgctgtgctgtgctgtgctgtgtgtgctgtgtgtgctgtgctgtgtgtgctgtgctgtgctgtgtgtgctgtgtgtgctgtgctgtgtgtgctgtgctgtgctgtgctgtgctgtgctgtgctgtgctgtgccccatgcctcagttttttaattgtttaagaatcattacatcaaggaacatctagtttcacagaatttgctagagcagaaggagaaataagaaagtcagatataatagaatagttatgcacaccaaggccaactgaaaagcagtcacacacaaatgaaatctatacagccattgcccagggctagggttaggagaaatgggaacaactgttttttacaaggagctgccgccagcttctgagatatttccatccgggcctactgcaggcagtccctgtcattgtatgctatccccagcaaacaagaggttgtcatcagaatgaaaccttcagggctcctcattgagaagctgacagtcaaggcttctcttcctgcctatgttagttttctaccactattgtaacagattgccacaaacctcctaacctaatacaaattgcacttaaggagctgaggtccttggtgagttcaaggccaacctgggttaccctgtctcagaaagaaaggtaaggaaaaggaaaaaagaggaaaagggaaaggaaaggagaaaggggaaagggggagaaaggagaaagaagaaaagaaggagaaaggaaagaaggagaaaggaggagaaaggagaaagaagaaaagaaggagaaaggaaaggagaaaggagaaaaaggagaaaggagagaaaggagaaaggaaaggaaaaaggaaaagggaaaaagggaaaggaaaaggaaaggaggggggcaagggagggggaagggaaggaagggaagaaagaaagagagaaagaaacaaacaaacaaacaaaggggatgggaaggaaaggagggagaaataagggagagagaggagggggagtcaaagaaaaagagaaaccccacaatgtattatagctctgaggtcagttcaaagcaggtcttactggatctcactaagttgatatcaaagtgctgacagataagcactcttcctaaaggctttgcagcctctaagagaccaccccattccttggtctgtgtccccttcctaaacctttgaagccagcaatatcccaccaggtccatctcatgttgccctctccctggctctcccacttctgctgtccccttctatttttataaggacccttgtggttatactgggcctctaggatgacccatgtcagccttcacatttaatgtcagccaatccaataccttgagtgccctttgtcgtgtattcacagatcccaggaattagaatgtgtgtcctgagacattctatctagcactctgccataacacatgaattgtgtatccccctctgcgcacctgattctacatgacacctcctctccctgacaggtctcttcctcagcaagattattagagctacatgttaatcagatgccgttgtcttaacgtacaggcagcattgtgatgaaaagtgcctatcaaaaataaaataatgttattgtggtttcatttatcacagaatagttgtccttagtgaccactaagattgtatttatgaagagttttaataatctgagggaatgcttatcttgagacactaagtaaaacaacacaaagttagaccttttgagtgtaacttggtaaattttttaaattttggcttagcaattaattaatgatactaactttcagagagcccagggtttggttcccagcacccgtctggaagctcacatctgtctgtaactccagtctcaggggatccaatgccctttctagcctctgaggggcccactgtatgtatgtatgtatgtatgtatgtatgtatgtatatatattatatatatgaatatgatatagacacatgtgaaataaaaataaatagactgtttttaaaagattttagagagctctagagatggtccctcagttaagaacccgcgcccacagccagatagtgatggaacatgcctttaatcccagcactcaggaggcacaggcagacagatctctttgagttggaggccagcctgatctacaaagtgagttctaggacagtcagggatacacaggaaaaacatatcaaacacacacacacatacacacacacacacacacacacacacacacatacacacacacgttggtctccaaagaatccaagtctgtttgatttccagtacccatatcaggcctcttacaactacctgtcattctagccccagaaagatcccactcctgtggcctctgcactcacttgcatatatacacacacgaagatgcacatatatacacataattagaaataataataacaacaaatataaataaataaatatcctagagaatttaggtagcaatagtcatgaaatagtagtcccctatggtggaatctcaagggagagatgttcggatatactaggaggcttttgtgtattctctgaggcttcgtcaaaagagtttccagaaaagttccctaaagtcatcattgtggaatgatttgccttgtaatctatagaggggagccagtgcaagggcccctgctctggatctcctacccactcacccataccctggcctctgcaggagctgaaggaggtctggattttgggactttgagggtcatggaggaggtaaagcagacccttcaactgaaaaaccgtggaaaatatgagatcatattcaggtaacctgaattgcatgggatgcgtgtgtgcgtgtatgcatgtgtgcatgctaactgcccctatgcactcaggaagagaagaggataaaacatgtaggtcttatgtcctcgactgaagcgccaggtgaaacaccccactcagttccctggaatccgaggatgaaagacacacatgtacatagcttttatatatatataatgttttagcttaatggtcaggctcttctaagccttcctcaacaatcacacccctcttttcactcccagctcagcaccctaaatctgccctcagctttacttgatctctaatctcctgcctgctaccccagggccactcaccccaccagagatctcacatggctgatggttctgtctccctccaaagcaaatatttcctctcacttgagtctgctagtctgcctgcaggaaaactagaagtccctcctactccacctagctcattggccacgagcatctttattgctggatcaagaaccaattggggagcaggaccgtcagttcagtattcacacagattcccgacaatcaaaaaagcatcaaaaccaccccctacaagaggatgtctgggaaattttttttaaaaagggaaaccagaaactggtactgtgagtaaagtgcctgttgtgttggtgtgaggacctgagtttaggtccccagcacccacattaaaaatccaggcatccataaccctggcacaggaggtgaatttctgaagctccctggccagccaggttagcctacttggtaagcactggtttcactaatagatccagtctgaaaaggaagacacctaacattgacctccagcctcaagtgttcaggcacacagcacatgcacacacacatacactatacacatacaaaacaaacaaataaaaagcctggggctaggagtgtagctcagttggtgaagtgattgcctggtatgtctttagtttgatctcttcagcaccatgtagtagcacgtacctcatcaggtagacgctaaaagaccagaagttcagagtaatccctggctacatagtaaatttgagaggccatatctaaaagaaaaaaagaaagaaagaaatatggataatagctcaggaatgacccctgtttacatccacagatgtgtgtgtgtgtgtgtgtgtgtgtgtgtgtgtgtgtgtgtgtagtcatacaagaacatacacatgcatgcacatacatacacagaaaaaaaaagcatagtgggttttgcttggtatgataattacaaagggccagagacaggcaggccctcaacagatcaaactgtcctctcagactttgtgggatccctggataattgtttaaatggattctttatccttgtcatccagcttcactgtggacaccttaggggttttgccaacaaacttaagttccatgatctcagtccaacccaagagggggacactggcctcaatagataagcccacaactgtccaggtgttcttccgagcaagaaaggaggtgaagatcgattgccagcccatcctgcgctgccaggtgagagagcccagaggactgctgactcattggcatcctgatgggggtggggggaggctgaaggggagatagcttttgtggcaaccaaagaaactacaccagagttcagtcccaactaaccagcacaggtaggtcagaacagagatgtgcagagtcaccagaaatagaaaaagggggaaggttttggggtacataagaaacaagggatctgtgttccaccatcaagtaaaagcagcaggcatggttgctacatgtcaacacgtgactaggagaaactagtctctgtgttggcaccctttactgtttttatttattcattaagatgaagcgtgaagtaacgactctcttactctctttttctccatcggggaagcaggcaagaagacagcgtatagatgtccagcctttgacactgcaacatgactgtaccctggctaacatcttcttaaaccttccctttctagattattgagccaactctcccagaaggtgagatcattgccagcatccctattaagttttcggtgaatgcagtatactccaaattcaccatcagcccctcctccatcatcaattttggggctttgatctgcggtaccaggaaaagcatcaccttcaccatagaaaaccaaggcataatcgacttcaaatatgccctctacaggctgacaggggagagtccaattcttcaaaagaagatgtaagccgagttctattgactctttatattctgcaaagagctgtgatatactgtacctaactaaattcacccagtcctcttgcaagaatgaagcagaccctcaggtttagaactgtcttgtgaaatcaccagtaggggttggttctgaagcatgttttctgatcagatttcaggttggctgccatcaaacacaagctaggttttgactgagacaaatgtaaagtcttgtggatgagtatgatggtgcatacctgtaatcccagtactaagaaggtagaggcagaaggatgaggaattgtgtcatccttggcttcctagcaagttctaagccagctttggctacttgagactctctcaaatgaatggctggatagatagatagatagatagatagatagatagatagatagatagatagatagatagatagatagatagatacatacatacatacatacatacatacatacataatagatacataatatgtagatatatatacataggtagagatacatatatatacacacatatatacatagatgatctatagatagatgatagatacatatatagatagagagatacattgagagagagagaataagaagaaagtaaaagggagggagagaggaaggagtaaagccttctgtgggaagattttggattctgtgttctggcctggtgtttctggtaagtcattgctctctctagcatccctctgggtactgaggaatgattacagaaaaaaaaaactaactctagcaaaagcttaagccgtgcctcactatggaggggggtggcaaagggcaccctggagatgtaggcaaaagaaaacagtgatgccgtcagcccagcaagcgccactcctgcctggtcacctgatcacctggtcacctggtcaccatggttgcctcagtagttacaatagtcatcctatcttcttcaaagggcatctctcatcaggagaccaaaaaacgaccgatcttttgagctctcttgtctcataagtttgtcattttccgtggaagcaaattttaaagatggcttgaatagttcccacgatgtgcctacctagatttttttttttttactttctaggcattttaaaacagaccttctcctcacattgcttattatagctttgtattttttccagctctaatttttctatactagcaaaatttgaacttattaagaaatttgggattcagagacaaagtttggagctaagatgaaaggatgggccatgcagagactgccccacccggggatccatcacataatcagccaccaaacgcagacactattacatatgccagcaagattttgctgataggaccctgatatagctgtctcttgagaggttatgccagtgcctggcaaatacagaagtggatgctcacagtcatctataggatgaaacacagggcccccaatggaggagctagagaaagtacccaaggagctgaaggggtctgcaaccctataggtggaacaacaatatgaactaaccagtaccccccagagctagctgcatatgtagcagaagatggcctagtcggccatcattgggaagagagtccctttggtcttgtaaactttatatgccccagtacaggtaaacgccagggccaagaagtgggagtgggtgggtagaagagcagggcggggagagagtataggggacttttgggatagcatttgaaatgtaaatgaagaaaatatctaataaaattttttttaaaaaaattgggattaaactgcctagaatttctttcttccaaatttaatttcagccttcttatagtttcttccgcagtgacttagtaatgcttctggctagcttacgttgtattttaagttattctcatttgtaggctgcagagatggctcagtggttaagagcacgtactgtccttacagaggacctgggttcagttcccagcacccacatggtggcccacaactctatgtaacttcagttccagttccaaaactcctctgacatccatgggcaccaggcacacacactgtgtacgtacatacatgcaagcaaaacatctgtgcacataaaggttttttttttaatatttttaaatttatttatttactgaattatttttcacattagcttgcactgattcatgcaaaacctcagatgtgtcctggtcatctgacaagtgaatgaatacatatggttttcaaaatacttttgatgtgcctcaaatacagttgcacactctaggtacagtagtctctggaaagcaaacaattggctacattggtttcaagtgaaataaatttccaaaatttatatctagctactgtttacattagcccttgtacataccatggccacaaacatgaataatggagacaaaaaaatgtcacttcatgcataaaataaagtcagataaaagactttatttttttttaagatttatttacttaatgtgcattagcattttacctgtgtgaggatgccagagcccctggaactggagttacagacaatttgctgccatgtgggtgctaggaattgaacccaggtcctctggaagagcagctggtgctcttaaccactgagtcatctctctagtcctaggtaaaagtggaggatgggggtggggtggtggtgttatcattgctgttgttagccagatttccatcactgttacaaaagacctcaaataataaattcacaagaaaaatagggttgtttgggctccaagttctggaagtccagatcatgacttcagttgagtctgaccagtgtatacaacaaagaaaaactgtttctctcagaccaggaagcaaaagggaaaggaaggggctagggttctacaatccctttgaagggaatatcagtgaactaagaatctcccattggtgttgtcttggggaccaaaccttttaacacatggaatttgcatgaagtaatttttaaaatccttatgattcatacttcacaagtatgattacccatgtcactttcttaataattattctatgaattcaaggtttcaatgccaccctggtcccttcctagacataggaaagccctctcttatccccacatcctagaagaaaggacctcaagcagtgtctcgtgtcctcatcaaaatctgaggctgtactcttgcatctctgatcagaaccagccacatgaggcatggaagaacccgagagagtgaaagcttctacaagcctggagcaactaaaatggccaagttctcagacacagtccagaaagacacgaacatagcaaaccaggtaagtcacacaaacacagcgaacacttttctcctatacttccctcttttttaaattttgtatatattttggatttgtgcacatgagtgcaggtactgatgaagccagagacagacggcatcaggtcccatgaggtgacagttacaggcatatcttagagcttaatccctgtgaagagacatgacgaccacagcaactcttacgaaggaaaacatttgattgaggctggctacagtttcagaggtgtggtccattatcacggcaggaagcatggtggcatacaggaagacatggtgctagagaaggagctgagagctctacgtataggtctgcaagcaacaggaagacacagtcggccactaggcatggcttgagcttctgagacctcagagcacacctccagtggcacacttcctccaaaaaggccacacctccaataatgccactccttatgagcctacgagggccatttcactcagaccaacacaaggcagttgtaagctacctgatgggaattctgagagctaacctcagtcctttgctagagtagttcatgaccctaaccaccaagccatctctccagccccagaacctgactgttctgtagctcagatgttgaattacattgaaatccttactcttcattcttcatacagttttaaatcaaaaatcgtttgtttagagaaaacagatacctagagagaaagccttctctgtccagatgacttacctgggagtctccagggctcaggtccagctcccagcacatgacaacagatttttagtagatagcaacccagttaagtctctagaaccttccatgcaggctaaaacatgccctgatgcagtggttctgtgaagcacatcaaaagagatttggagggcgtgagagtggggataagtaagaaaactgcatctccaagggcaagaacagtggaatttggttgaaagttgtcccacaccagtacccacctcctgtgctagatagattccaagatgcacaacagagacatcgagacatcagaagtcagatcgcctgccatcgtgcggctttgtgaagctgatcaagagtgcagatgagcctaggaaccaggagcatatgctatgtgtgtggtgatgctctgaggttattcccccagcggggcatgttgtgtactggttgtcagtcccagggaaggattacaagcatctccccaacatcacacagttaccacacctggtgagggaattctagccacttcaccagctcctgctgaggttcttagatctagcaggaaacccagctagctgccagagtatgggtccagtgagactagacactgtcagcctacagcatgcaaaacatcactcacgcagcaaagaaacaatggctaatgtatctgggtcccatcctctaagatcctgcccaaggcagcagagtctcacatgtacataccaacctcacactgcaatccccaaattcattctgctctgggttttcagacctggaagaaacttgggtctctgagctaaagcactacagaacatatagaaatgtaaggacagaaactggtatatccaagacaatctttctctctcacaggacattgcgttctaagtatatgctacaattatcttgagaactatactagtggggggggaactggtgtctgcagggacattcaagaagtctcttataatgacattcttttcattttagcactaattctgcactgcatgctatatacagtatatatatttccatgggaaccctgtcagtccgcactgcatgctacagtacatgcctcatgactattctttcatttaaccttcattgacccatcatgcaaggaacatttataggtatacaagccgagacttggtgaaatcatttttcaaaagccaaacaagatatttggggattgagttcaagccccagattgtcttgttgctagtctattgctgtgaagagacaccatgaccaagtcagcttatagaagaaaacatttaatggggggagggggagaggttgcttacagttccaaaaagttagtccatggtcatcattagcaggaagtgtggtggcaaacaggtgggcaaggcactggaggagtagctgagagcctacatccccatccacagatgagaggcagagagtgaggccaggcttgatgtgggcttttaaaaccataaggtccacccccccagtgacacacctcttccaaccaggctgtacctcctaatcctttccccaaagagctctaccagctaaggaccacacctttattcaatgagcctacaagggccattataattcaaacctatagagtgttactcacaaatcctcatctcagccactattctattctgtgccccaccccaaccccactgttttgagatcccccctcccatctagataagtactgtataatgtacacattatctgcttctaccttgtctgatcaaaagggatgtacagataaggacgcactgaaaacccatccaccatgaacatcccgggcctctgcctccaggcaaaggggagaagagatgccaccaactgagagaggcaccaccgtctccccatttcatcatctcttggctcctttggaaagtctcctactctgttacccactttggttccttctatttgtcctttccacctttgtcctgcaggcccgcttcacccatggcatgttcactgtatacccaggattcggctccatcccttctggaggacagcaggtgatcaccattgagtgttttgcagaccctgtggggaggtgtgaagagtttctggccatcgatatctctgaccgagaccctagagaaaatcctgccggcatcccttacactctgcttgctgaagcatgtctgccaggtactgcaacttggattggccaacacccttaatttgccagcccatccctctgctgagagagaaaaatccctctctcgagatttccagcagacacagaggggtcacttcatctggaaccttagagcctcttctagggtcttcagccatatctgtcctgaaagccttagcacatgtaggggagaattgcttctccaatgcttagcctacctgggtctgttcctagattccccgttgagcggtgctctctgaggaatgagctggcatgagatgtggcccaagattgaggagcatcaagtctgctcatgctctcctctcttggctcccaccattctttgccaatggaaagaaaaggctgatagagatggatcgaccagaagagagagtataaaagaggaagccaacagatttttgtccaatctgtcatttacatactggtgtgtggacgtccctatctgtcctccatgacacttacttttgattatcattgtttatttgtatttgcaatgcaagaaatataactcaaggacttctgtatgcttggcaagtactgtatcattgaattgtatccctagccttgtgattctcctttttcaaaacccaaatatcctagaatggcaagatggctcagaaggtaagggttcttgccaccaaaactaacgacccaattacattacaatccatagaatccacacagtaggaaagaatagactcctattgcaggagcaagttgtcctatgaactccacattaaattgattctctctctctctttcttccccccctctcccccctctctctctctctcacacacacacacacacagagagagagagagagagagagagagagagagagagagagagagagagatgggggtaatattttaaggtttttaatccaaattagcatgacaggaaaccaggatcctggcagccaggcagcctcgcattctccccttcatcccctagcctttgtgaccgacaacaacatcttgatatttgaggagcatcagatctgcaccagccccaacctgtaccacatcctacagaccatacagagtggggggctgttcgtggaggatgagaacaagttcatcttctgcaatgtcctggtgggtcatcaggccaaggctcggttcaagatcagcaacgtgggcaagatctcctgtgacatcaacattgtcatcaagcccatctccaacaaggtaggaggttcttttgcccaggccctctatggttggtacaaagccatggaaggagctctgggaaggtcctgctgtcaacccctacacctaggtgtgaaccatgaggctctcgggctttattagaagttctgtgaggttgcaaggccatgtaccttagaccaggaactcgtgtgtgtgtgtgtgtgtgtgtgtgtgtgtgtgtgtgtgtgtgtgtgtgtgtgtgtctgtgtgtgtgtgtgtctgtgtgtgtgtgtctgtgtgtgtgtctgtgtctctgtgtcctgtgcatacctttgtactaacctggtacatactaatgggcaactcatttgtctgtccaaatcagttacttactgtgtaactgatctatacaagcactggaagagaaggccatgatgagcaccagctacaggcagatcaacctccagccattattctctaaccacattgtagagactgagcagctccggaaatttggggaacctggattgtggtggcttgtctttattttttgttgttgttgttatttattttatgtataagtgttctgctgcatttcacctacgtgtcagaagagggcatcagatccctttataggtggtcatgaatcaccatgtggatgctgggaattgaactcaggaccctggaagagcagtgagtgctcttaacagccgagtcatcatctctccagcccaaaacctggcttctaaagagaaaagttttacgacagtagacttgggaacatccaacattttcctctccagtttgagacttgaaggggatccctagggaaaggcagtaaaatcttattgccctttggctaaagaatgagaaggggttgcttgcgttgtgttctgccagtactcggaagaaagaaaaggctcttccaaagcaatgctgggtggctgtgcggttcaaaaccacttaccagagagtaacaggtcaagtgctaagggaaggtatctaatcatggtacttggacttacaaggaacagaagctcctttgggttagctcagacaacacaaggatcccagcagtgagtcaggaacctccgactcaggtcaaaacgtatcagagcaccagcagctcagccagcttgcagctcagctccacattaattgtattaacttagttggctaggcacaatataaggcggtggtttagaacgtttggccaactggcttggtttgtctatttgagtcagagttcatggtctagccaagtacagccagatgccatctagatgtaagtccccagactctgtgccactctgtccagggcctgtgactcaccatgtaattgagcttgtctaggagagttcacagcagggcagagagatcagcagtcggccccagcagaaatgcaaagtacccaaccccatctcccttccacagccggccaaccgcatcactgacacctttgacgtggaacccagcaagatgtgcatcgggagccgctcacatgccttcgtcacagtgctgttcacaccacagaccatgcagacctaccagtgcatcttcgaggccactttggatggcctgcccaggtaccaccacctcctcctcctcctcctcctcctcctcctcctcctcctcctcctcctcctgtggcagaaccacagtatacatgctgtgtaggaaagtgtccccgcctggtcggtttcaggcaccttgcttgctcttcctgtcccctgcagcaacattgccaggagccgaggtcttgtgtttgatattgttggtgaggggactctccctcgagtgactgtcatccggccaactctatataaccaacacggaaaccccttgctcctgtttaagaggcttctgcttggtcattcggagaaactgcctctcatccttaagaataacggcaccatccccgcccaggtaacagctgagggtgacatagacggttacctggggtgacagctgagggtggcatagacagttacctggggtaacagctgagggtgacatagacggttacctggggtgacacgctggtcagaccacactgccttatttctgcctcacagtttctgaggttttaggaccacagtcctggcttctgtcaattttaggcccatggcgagaaggaacattatggcggcactaccctgcatggtcttcatcatggtataaatgtttccacagcagtggctctcaaccctcctgatactgcaaccccttaacacagtttctcatgttgtggtgacccccagccataaaattatttttgttgccacttcataactgtaatgttttctactgttgtaaatcataatgtaaatatctgttttcccagtcttaggcaacccccgtgaaaaggtcatgagaccccgaaatgggttgcaaccctcagattaaaaaccactgtcttcttgtatagttcaatgaggttctgctacctactacctggtttgtttgtttatttgtttgtttgtttttaactttccttaagaatctttgtagattcggctcatatgtgagcttaagaatcattttttaaagttccatttaaaatctcattggaaggagctgcagagatggctcaatggttaagagcactggctgctcttgcagaggacttgagtttggtccccagaacccacatggtggctcaaaaccatctgtaactccagttccagggaatccaacatccctcctggactcagcaggcattaagcacacatacggtgctcagatatgcatgcaggcaaacacccacttacatacaataaaatacatccagaaaagttttaatctcattggaatcaaaattaaagactatgagttgtctaggggagaattcctggtttcagaataactgtccactgggagtaacgtttggggttcctctccatcatttagatttctatctcaatattcctaaaatattaataagttcctttctatagtttctctttttgacatttattttttattttgtgtgtacgtgtgcctacacaagagtgtagaggcccgaggattaccacagcggtgagttctctccttctagcctgtgagcccctgggagggaactcaggttgccaggctgaacagcaagtgtcttaacccactgagcagtcttggttcccctccattgagtttccccgatggttatttctaaataccacaatctctggttgcagtacagtggctctgtaccttccttatcttttattctttatagtcagcaatgctactttcaaaaaatatcagatttctcacacctaaaatcgaatgtctggcttttagccctgcctgcttcccagtggaccagagtcggtctgagttggttttctttttttttcctgtcaccttgctaggatatttaccatgactctagcaaatgcacagcacctaggaaatactggcttcccagaagtcatagctgtgcaatgcttcatagaactgtaggtattcattttcctttcattagcctagatacgcctttccattgtctctctgtgtaatagaagcattagcaacccccctttgacactgtctaactgcataggccagaaggtcacctatcacctttgggcttccagctcctaactaagatactaagaatggttcctaaccaaatgctcatttttttctatctgggtctaatgtctactacatatatttcttaagtctcttaagaccatgagctagagatatggttcaatggttaaacacaaacacatatgaagtacaaagttctgacacacacacacacacacacacacacagagcccgtgtaaaagcaggacaggaggtggcagtcacctgcaatcctagcactcaccaggcagagactagctagacaagcctgaatcagtgaattcaggttcagcaagaaaccctgcttatatataaagagaagaactattgaggaaggcatactgtcaacgtcaggcctccacatgcatgcacacctccacatacatgtgtacccacacacacatgagaacacacacataccaggcaaaaatggagaaaataaaaagtgaatactgcatataatgactgaacattcttgccacccaaaatacagtgcagtatcacaacccagactcaaattcttgagcagcctgtaagttcaatgctcaaccctactttcttctttccagctgcatgtggacctgcgggaccaactaggagtcttctctctgaaagggagacccaccacctcctacatctacatcatggaggaaaataaaccgaatgaaaaaggtgagtggagggtgcaggagcctcagtaggcaatggagaactcagaagctattttaccagggacctctcagtcacatcaccagaagccaaagctcgttccccgcagaggggctgccctccttccaacctcggtcttcccagagatgcattcttctaaatcataactttggtcttcactttacagtcaagaaagcccacacggcctccctggttgtttctcctggagacacggctgaatttgatgtctttttccactccaataagattgggagaatgacaggcaccatccacttatcagtgatcaacaaccagtatgaggagaccatgatccacctggttggagaaagctacgaggatgacatcaccttggacaacatccatggactgatcagttccaccagccaggagagctcggataagtctgaagtcatagagatcgccgaggagagcaccatggaggacttggtgacaggtgggagaagtgcaatcttgacagctgttgactccagtcactctcttgatcagtaggagctctgccacaccaggctcagtcacactgtgtacccttcattcatgtgtgtgttcatgcagtgaacttttagtgccaagtgcaagttccaagtgctacactgagccctagacctgcagattaataagaaggccttcgccatttttagggaacatacagtttgatgctgatgttcctgcttagttctttagcgaactcatgcctccttgtagtcccctgcctctgtcttgtagctagcttgtgtcgccactgagggtttcatctgaaacaggctttctaagtgaaatggtggactcatctcactggcgagggatgggcttgtgccctcctcctcacagcctgactgcttgctgagcaggccagcagcctacagtatcagcatctcctaggttcttgtcagaaatgagaatttgagacccaccccaacctgcaggattataacccacattttaaccagatccctgcatgattgcgtgcatattaaagcttaagacatggctctctgcagtctatcaaccactgaaccttccatttgatggtaccctgggaaggaaacattttacattataattattgccaaaaaagcattggttaagtactgtaaccatatgactgattgctttaaagtgaattgtaaattcgtcttcaaaatttccctaggagcttaattacagtcccagaatgtataatcagggactgaaatcaacactctttctgtaatcagtgtttcactcctgtttgaagctatacaatggcatcattcttgtcagggataaaataggagctagcagtaattcaaggttagagattccatatctattagagggttttcaggtttagcaaacacgaattcaggtattccaaagaaaaattaagttccagataaacaataacttttagtatatgtatgtcctcaaagtattgtgtgggacatatttatcaaatataaattactccttgtttgtctataattctaatttaattgagaatcctatattttatctggcagtcttaacatttcattgtattatctcgtgaaacaaatgacattagaatctttattttctcttgaacaaacgcaagagccaaggtcagtgtacagatagaactgatatatggatgggtgggaagatggatggatggatggatggatggatggatggatggatggaaagatagatggatggatggatggatggatggatggatggatggatggatggaaagatagatggatggatggatggatggatcgatggatggatgggtggatggatggatggatggatgggtgggtgggtggatggatggatggatggatggatggaaagatagatggatggatggatggatggatggatggatggatggaaagatagatggatggatggatggatggatggatggatggaaagatggatggatggatggatggatggatggatggatggatggatggatcgatggatggatggatggatggatggatggatggatgggtgggtggatggatggatggatggatggatggatggatggatggaaagatggatggatggatggatggaaagatagatggatggatggatgaatgaatggaaagatagatggatggatggatggatggatggatggatggatggatggatagatggatggatggatggatggatggatgccccttagaggcagatccttctacccaagaatccaagatttttcctatgtaattatctaaagaaagtgcaaaatgtgcttaagataggaatgtgtatcaggacatgcctccgttagatagcagactctcccgagaggccaggaaccacttaccagccttctgcttcggacccctagctgccctgatggaacacatccaatttgggtactgtcatattggaatcagctacaatgtgagcttcaccatcaccaaccacagccaagtgaatgtgattcgcttcgagtggccccttttagctacactgtccttctccccacaggtaagcaaatgtcactcaatgggtcccagacccccttgggcctaagccaagcccaatgtgattgtcactccatcctgtggaatgggatgcatgcatcttgaactaagaaacctcccctcaaccatgccacactcagacctagtacttgagggtgctgctcaggggcctctggtctaagaggagattaacaaagactgctttggggatgaaactgaggtattctctggaggcctgtgtccctctgtgcatgtgttcttcaaagcatggccttcagaagtggcacagcaagccaaaaaaatggtgcttcatccctgcaatcctaatacatgggaagctcatgctcccacaagttcaaggccagcctgagctatagagtgagtcccaggccaacaccagctcaagcccaaatctaaccctggggagtagctacagaaaactaactctgccagacccagttccaaagccttgttaaattcctttaatctttgttaccaacatttgacctatggggatgcagggggcatagaatggatgtgagtggataattgacgttgtcaaagaagacagagccaggcgtccagcagttggcttacatttgtgtatacccatatgcacatagaaacacatgcatttatttatcttgagcaatctaaagctgtcatatgccttcactgtccaggggaagtagagatgtcgctgtcttctctgccagaggactatcatgtgaacagtgattatgctggtggtgtatgtacatacatctttaactacaatgaattacaaatcattttattctataaaccaaatgggatctcctttacatcttgtatagttgaataatttaaaacttttccatcccaggcttcctccgtacgcttaagcattgttagaaccctcaaaaaaacttttgtccgtatgaatcacaattattgatgattagcctattagaaattaaaagtaggaatgtgtttagatttatacttttttttgtatttgtatgggtatgatggtttgcctacatgcatatctgtgcgccacatgtatgcccatacccacagagaccagaagaggatatcagatcccctggatctggttgtgagctgccatgtgcctgcttggaacaaacctgcatcctctggaagagcaaccagtgctcttaactactgagccatctctccaggacctcaaattaggaatattttaaagcattcttttttaatgatttttaaagttatttttatgtatacgagtactctatctgcatagatagctgcaccccagaagagggcatcagaccccattacagatggttgtggggccccatgtgatagctgggaattgaactcaggacctctgaaagagcagacagtggtcttagccatatttttaaacatatttgttttaaagtacaataagccaactatcttttaattaaaataccatagtttgccaggctgtggtggcgcacgcctttaatcccagaacttgggaggcagagacaggcggatttctgagttcaaggccagcctggtctacagagtgagttccaggacagccagggctacacagagaagccctgtctcaaaaaataaaataaaataagataaaataaaagaccatattttatttgtaaaaaactatattttcaaaaacgtatgtggtcagtgtagaatcatttcatctttcttgttaagatagggtctcctgcaagagcacagtggttcaagcctttaatctcagggggcagaggcaggaagcagacactggcaaataattgtgggttcagggccagcctggtctacagagcaagttccaggcaaccagggctgttacaaagaaaaaccctaacttagggggaaaaatagggtctcctttgtatcccaggctagccttgatcttcttaccctcctgtccctgtgtatcccaggctagccttgggcttcttatcctcctgtccctgtgtatcccaggctagccttgagcttcttatcctcctgtcccaggcttgtgttatgggtgtgcaccaccacatccagccattttatgtctttatacatctttaccatataactgaataaggtcatatggcttctgctatctgctcgctctattcagtctaactatgcaccatcatctttaacttctaggaagttacactgtcactcataagaaaaggaatgtacaagaatcaagtggcatctcaggatgttattgaaagttttgtcctccaggttccctggaaaggtcttggagatggcaagggtcattggatcactttctagaaactactgtactgtgttgagtgacctatatgtatgaataataatgtgtatcaggtggttgtgggtagcatttggagacatactgcttgaactttaacccagatcactagtgttaaagactttaagcaatttacgggttttttttttttaatctgtaaagtggggaatgatagctctgtacttctcagaagatattgtagggattagtaaaattgctcaagagttgagaatacttcttgagacaagtaacagtggtaactattactattgctcttagtgtgtgtgtgtgtgtgtgtgtgtgtgtgtgtgtgtgtgtgtgtgtgtatgtgtgtgtgtgtgtttattttgagagaaggtttcactctgtaacctaggcatgcctaaaaacctattatgtagccttggctggcctcaaactcatggtaaatctcgctcacccttccaagtgctggtgctcctccatgaaacactgtgcctagggtctcttacatgatttaagtcaatctacctatacaggcatggatgatatattttgagtcactaccaggcatcaaaggttcttaggattgaattctccaaaatacaaatactccatttttccctagattgggcatctccaccctggctgttccaaggacgtggtggtgaccttgaaatcagaatcacccatcaccctgaagaagatgtgtgtcaagtgcaagctttccaagatcatgtttcagctccctgtagaccaggtccctgactgggatgaccgcatgcgcacagtcaagtgggtggatgctccccgaaatacacctctgaccttgaatacaaaacgaaaggtgagtatacaagggacaggaaacacagacttcatccagcccgccatgctcggtacccactgctctcaattttagtgtctggctgtggaaaacagaaaaggtttgcatctgactttggtttcaaaaatggcaaagtatttccatgcccaccacccttacaaacgacacataccaccttagttgacaaggtttagcttcagtctatgtaaagggttcagcaagttcttccatcttcttcctctttttcctcctcctcctcttcttcaaatatggcatcactagtcatttagttgtttcctgcttccaccgggtgtctggaactagagtaatcagaactcccagtgcatagtggtatctcatccttggcacatatgtgccccttgcatcttttttttttaattctataataaattaacccatgcccaatgagggaactaggcccccaaatgctgtgtagttctggccattccatctctttatctctctcctagaggtaatcacaatcccaagttactcccttgttcaactgttgttaatctgagcattctagaaggattgaggcagagctgtagttctcaactggtttttttttttttttaagattatggtatgtgttcatagttgtgtggactataatagtatacaaatttcactgttgtttacagtccagactttttctctcttcctctgaaagttatttcaaggtgttctcttatggacagcatttctgtgtatgttggcatccatgtttacatttctacaagtggggtcactaaatcctgtgaacgtccagcccttccaagctgatgtccaagtgttttccaaacttgctagactgatttctacttttacaacgaaggagtcttgtgagacacatcctttccaacatttgatttgactttgtcagacatttgggaggctggttggttagttggttggttggtttgtgggatactaaagagaaacccacagccttaggcatggcagtcttgcttttatcatttgaacaactagggtattatctcatgatgaaccttgattgtacttctctagtcactggccagactggatgtgacttcttactatcgctgaccacacaggtcccctcttacatggatgccttttttgtgccttctgctcatttttcagttatgacgctcatcctgtgtttaaggtttcttatctttaagaaattccatttgtattatgtgtccacgcattctcaaaaatctagagcttaactttttactcagtttttgttgttgttgttttttaagatctatctttattttaactctttatatgcatgagggaatcggggtatgtacatatgggtgcagatgtcctcagtggtctgaagagggcatgttacaggtggttgtgagtgaccctacatgggtgctagcaaccaaactcaggtcaacatgtgctcttaaggactgagatatctctccatcccctctatattttgataaacaaaaggctattcttaatttttaaaagatgtttcatttatttttaatttatgtatatgggtgttttgccagcatatatgtatgtgtgccgcatacctacgctgcccacagaagcctgaggggccatcagatcaactgaagatggagtggttacaagtggctagctgccatgtgggtgttgggaagtgaacctagatcctctgggacagtggccagtgctcttaaccaatgagccatctctctacccctccccaaatattcttaattttaatgtagtcaaagttatcagtttcttttttgttacatttattatttttgtatcttatttttgaaaccattccctccccaaaatatattcacctcactagatattttttaagtatgagcttggcctttgatacctaagcctttgatgcatctggaaattccatctgacgtgaaactaggctctaatttcatattttttattgagacaactcccttgccaagtttggagcccttctgttccctagtgttctgatagaactctgtgtcatatctcagttttatctgtccctaggtcatttctgatctcttccattctggtgtcagctcgtccatccctgagcctgttttcttaatttctatagcttcataatcaacatgatgtctgagggaagttcctcgtctgcattgttctgttctaaatcttttggccattcttgatccttctctttcttctactatataatttctgaatccatctgccaattattaccaaaacctgtaatggaactgattacagtatttggaatataatattaactcatccttcctatttaaaaaaaggtatttctattttttaggccttctctaagatttgcaactgtttctttaggagtaataaagctattccattgctttctttaacatttttatccagtttcttttactttaagatgttttactgttcagttattttgatgggtctttaaaatttgttcttgcatgaattttattaaattacttttccctccaaattttcatgttgatctaaaaagatggagttggtggtgattcacacctttaacgaatgattcttgttgtttgcacttttcctaatccctcttagcaaaaagttttaaaatcctttcacaactaaataattcttttgatcctctccatttgcaacttgttttctatttaatcaatacctggtcttttctctatggttatcttttctctatctttttgtttttgtttttgtttctgagacaaagtctctctgcacagccctggctatcctggaactcactatatagatcaagctagcctcaaacctgactctgccttccatttgttgggattaaaggcatgaccatgcctagttcttctatcttctttagagtccgtctgatccaagactcatgcccacatggtcctgatcctctccgttaattacctgctacccagtttttctcttccattcagagctatcaaagatttgacagtcatgtcttccagaactgtatgtatgggttcatgtgcctttccgtggtaaatcagtgtgctgttccccagtgttcctgtgcatggctggctttgcagtgctaaggacgtggttgcctttgttccaggtcatagagatggaccctgagccagcccactcggtggtagaagaaaattaccgagaattgcggatccagttcagtgccaatgtggattttgcttcatatcagtgtgaaacaactgaagtgttctttaaggaaacactggtttaccagacccgagtgtttgagtgagttactgggagcttttacccaactaaggaaactgtctttaaggaccaaacaactgcatgtttaaattttttacatatatattgcatctttcttttttaaaaaaattgcatcaaataaatgggttccaatggcattgcttaaaaactgctttttaaaaaggttctcagtcaggaatggtagttcgttctgtagaggctaagaccagataatcttgaacaccaatccataatagcctatataacagcaagactcaagtctcaaaacattttttgagacagggtatcagtaagtgaccctccttgccctggaactcaccctgtagaccaggctggcttcggactcaaagagaccagcctatcattgcctcccacgtgctaagattaaaggtatgcactattatacctagctgtatttttttaatccttttattttatatttgcttttggataacatgtaataatgatgcatatttacagcatagatgcatctacctgtaaatggttggggcagaatagttagcattcccgtccctggacctttatgtggagttagaacctccagagtcctctcttctagttcctcataaactacctcataggcttctataaactgcagaacacacttactgctctcccagtgctgtgttttactactgttacccaacgtctctctatccatgcctcccccaacctgtcccagcttccagtaatcgtcatgctaagttcttccactatgagagtaaatgtattgacttccacacgtgagagagaacgcacatgtgtctttccatgtccggcttgtttcgttcggggtgatgtctttcagtcctacccattttgatggaaaaagacagaattatagagaacagtaaggaggttactcaaaaggaaactaaaagtagacctactgtgtgacccagctagctcacctcctggtgtatatccaaagggggagtccaatcaatatgttgaggaatgtttgcactcccatgtggactcttcatagccaccaagatgccaaggcaaagcatcagcctagctgtccactgtcaaagaatgaataaagaaaatatgaatatttatgtgtgtgcacaacaggctaaaactcagacataaaaaaaaaagtacctaagaaacaaagtgacttgcctttgacaaacagtacagccgatactcaggtagggcagaaattatggacaacccattctgaaatctgctcctgatctacccacaggtttgacctcgttaacacaggacaggtgctgttagaattctgctggatctcagaagaagcctccaaggcagtcagttttgccatgcctgagcgtcaaggtaaactcagtgccacatgaaccccagggtctgacctgagtcaccattctcagagaagccttagaggccagtgttactcccgcagcctctgagtagctaagaacagcagagcatgggcctcgtgggtttacaaagccacatggacctgagcgataagtagctttccctcttcctctccagaatgatggctcgtgtcatctatcactaggaatcttgtcttctagttctgaaccttcgggaagattgccggtcacaaaacaaacaagcaagcaaacaccctatgatggggctggaaagataccccagcagataagagcacttgtgcctcctctaggagactcaggttcagttcctgggatccacatggcaacttacaactgtctgttgctccagtcccacagggtcttgacaccctcttctgatgtctgcagcatcataaatacatgtagtatacaaacatacatgcagacaaagcactcatacaggtgcaaataaaataagtctttttaaaagaaaaccatgggccattttcccagaagaaatagaaagctctcccaaagtgtgtagtgatatactatagcacgaagcactagcaaagggcctagcacctcgtgggtatctaaagcagtcattgttatttcagttgtggagactcccagattttccagatgggcccttacccatggactctcactttgtaaatccctatgttatatcaatgattggccacaaattctattcatagcccattaccctgttgcagaatatctgcaaaccctttcttgacctacaacccctgagccaaaaggaaatcaatctgaaagcaccatagaattaatagaagtgtttttcacacatcacctgtgaagtgtgaattgattcctttctacttgtgcccagcatggactatacctgctataaggcatgagtccacagatatcacagaaggtccctcggaacttgggagcagcctgcccatcccattaccaccgtggaatatcacctcttctctatcctccctcaggttcaagtcaaaaagagctaagtcagggctcaggcagctccctggacagtgccctggaccgctggaccgaagcctcgccatcacccttctcagtggaacccccctcaggcgttgtgcccgtaggaaagactcaaaagctcaaagtgaagttctcgccaatggacatcggagagttcgagagctccttgtactgccagtaaggagatgtgttctccaagcctccagccctcagcctcctcttccaccataccctagatgcctcacagagcccggaagtctaaaagggcctaccttcggagaacaaagaggatgtagtctaagccccgcccatcaatttctcccgcccttccacctgcccacttcccccttcctggccacatgcaggactccactaaataagagagtaatttgtagcccagcagcttctacccctttggaaagcttccttctgtcttctctgagcctccattgcctcatatataaaatgcaagcactaatccttatcatgtagaattatttggcctgctaaatgacctagtttaagcaaagagcctgcagcaatgcctggcccacaataaactcaataaacaaagacgggaaggaatattgggttggcagacccggtctggtctggtgtccagtgagagagagagaaaaaaaagtaaacaaatacatgtatcagagagcgtcccagatatggcaccttcttccaggaaattttccagaaagaacacctgccttgtagaagcttctctaagtcttgccctaggatggcagaggcctacctgaagtgccagagttcccctgaacccctgatcttataccagagagacctctgccacactagagccacctcagctcagccccaaggctgagtctgttcatatgcatcaccttctccaagggtcttagaataacttggttagggtttccaggtccttctctataatctattggatgcctaggagtgaacccaaagggcaagcacgttgtttacataaccactgataggagggaaaaacttagagccacatacacagagggtacttacatctaggttcctcagagtcagcccacttgtccatttaacagtaaattcattagtgcctattatgctactatatagaatgtgccagtcaaggcaaaatatggtgtgactgaccaagacaaacccaccctctgctcacatggaactcacattctggtaaacagaatatttatttccaaccagctaagaaagggacaacgggatagaaaaatcaaaattaaaaataaccctctcatttcagaattcccaacctcccacttggagaacaaggtcctattttgataacaaaagggcgaagcgtcctgccgttctgccactttgacctgaaggagtcggactacatcagtggtcatcggcgcaacccagagctccgaggaccaggcgctgggcctctcgaacctaatacccgtgtgattgagttcaccagtgtgggcatcggtgggaagaatgtccagtgagtctgagttgtatcgtttgaattccagccaatcagcccttccaaagaattcagatgcagaatccagaaaaagcccacccatgctgatgcctagaagcaaactggacatctcgagggttgccgtagaggtttaacatcggagaactgatacacgagcgaagctgggttctgtttgcgttgcttttgacagtaggggaactctagcatgtataaaaatgtgaattccctcacctccaccttggcacagagcatcccttgacacatatggccttgggagagttaatcactccaaactccatagctgcaccattcattacccccttagatgcctggggagatggcatttttatttctacagcaatgaagttctctggtcatttctagttccctgtggggagactgtgacagttctggggtttacatatattttcttgaattttttttcaatatctcccctaactttcttctgtccatctttcctccccggccaggaccttcacaattctgaacccgaccaacagcacctattctttctgctggacctctgaagagacggaaagtctccagcaccctccggcctttgtgtgtcttacagaaaagggtatcatccaccctgagaagaaagctgaggtgtgtgtggacggggacccccacaactctagccatctctgtgtagcaagagtgtgaagggagaaaagtattgatgaggatccatgtatttattgactgtatttattattgttcatcaacatgtacaatcccagtgagcaagatagacctgggctctcttggctggctctggagacagctctagtatttgcggggattttataagaatattcaaagagccaaaggggaccagacacaagtatctggggcttcctgggaccatagtataaggccataaagaactatctgtatctagaagattgacaacagcaaatggatatgattttactttcccagagaaataggcaaaacgcacgaatgaaatcctatctgtggcttagtcctaaatgtctccacaataacataaaggaggcggtcagatctatatgtgaacttgccttgccagtcaaagcatatgtgtgggctccatggccagtaagctctacagagaatcttacatgtagcaataaatccacgaattgaaagttatgaatttaaatactgtccagaagctggtgagatggctaagcaggttggggggggggtagttactgccaagcctgagacgcatatgacgtaaggtgagagccgactttcacaagctgtcccctgatctccacatgtgtgctcagcacacatgcacacatgcacacatacacactcaccaagagagaaagagggaaagagagagagagagagagagagagagagagatcggattactctgataataatattaaagtgggctgcatgccggactgctgacagacatgtgcattgtgtcgctttgctaattcagttcactgtgctgcagtcgtgccatccaaggaatggcacagaatgcagctgtataatcagcagaagctgtgaacggggtgcatggccctactccccagaaggcagggcaaacattgacaacgtagattgagccacacccattttagatggtaatggaaacctgggaaaatgtcacctcttatggccctcatacaagtaggtctccaaaaggacaaggaagaaatgcctctcactgtccttttctgacttgtcgtcatagattatattccagttcctgccggctcacctggacatcacggaagagttctggactttctctatcccagagcataatatctcagtccccttcctgctggtgggcaagaccacagacccccttatctctcttgacaagtctcacctcaatttcagctctctcctcattggtaaggtggctggccctgtcgctctctcactgtgaattggcatgaccctaggtcaccaaggactccaggagcagtcaggagtggggcactcttcttggaaccttccaaaagtatgtcagaagcagagagccatacgataattccctctcaatctcatttccatcggctgtctttggcagccacaccctaacaccttgaaatatgtgggagctttgttatagattccaatcataggaagaagactagcaaaaactaaataaaataaatagtaagtcagaggttgataacgtgttataggaaagaatgtcataggataagaaaaatagaaatgtggcacacaccaaagaggtaacattcagcagagacctgtgctgtaaaggaagtgaccatcagataatgcatagctctgtgcatctttcatatggatatgggtgggactgtaaaatccagctaagaccaaagagtttttaagtgattcattagaagtttatttagacaataatattcttgacagtaaatcaaactatatgaagggtttaatccaagacttcaatggtgcagatttcggtataatcactgaatcaataaagaaccatatgaccatgttaatgcaccaaatatagtcattgcttaaattcttcaaaagttcatccctattccaaccctcaaaaaccctcccacaataaaacaagagttgaagagaaaacataaagaatattaacctaaagcagcaggcaatcaaatagtgtcctataataagcccagaaacaaacaaactaactaacgaactaactaactaactaactaactaactatatatatataatagatgagcatgaatcttaatggagagaaagtaataatctaacttgctgcagctgatcactttgcacacataaatccccaagagatgagagagaaaaactactagagtcaagataacttagtaaagtgaacaagataagtgtccctttttgctgtaaacacctagaagcaaaaacaaaaataaaaactctactgctaaccaaatgtacattatccaaagttaaatccaattcctaagacctatatgtcaagagttaagtgacattaaaatgcttcaaaataggagctaaacatttggttagttctcccaaaattaaatataaatttaatcaaatttcatttagaatcacagctagggttatacagaatgcacagctaaaatttaattttagatagatgcaatgttaatacacacacatacacacaaatacaaacacacacacactctatgtcccaagaaatagttgggtcacatttatgctaataaaggttatttgctaaatctgataggttcaaatcccatagggctgaggaagggagagaattggataagacaattctaagttttgtggggaagtaaatgttttaacattagccaatgagaaaagcaaaataatgagtcaggaccctccacaggagagcccagggccatgcaaggtcaaattcaaaagaactacaggtagaaactctgtatagaaatgtgagccatcaaaggggttagggctgggggcgtgggggcgagttccccattagagacccaggaagaccttacaactcctgactgatgggaaaagaaaggtgtcaacagaatcccagccgagctgtggccaggtcagagaacccaccttctgaaggagcagtcaattagggaagaaacattttgggcagatgatgtggaatctgcctacaggaggaaggtcgctgggaaggcaaaaagaaggaaggcaggcaggcagtggtcagtggctgaggaattcaggggttgcctgaaattgttctgtgaaagttggggggaggggatgctgagattgctctgtgaaaccttcctcttctgcgtggggcaccgtctgctacaccacctcactgagcaggagagaggcccttgctgagggatggcgtttcccccccaggcagagaagcccgagagacagtaaagatcatcaacaaggaggagcaagggttcaatttcgccttccaggacaactcccgctattctgaaggattcaacaacagcctcattgtatgccccatggaaggctggatcccgccactgtccaggtgagtagaactgaaatcctccagatgcatggcagggtcccaggcctgccagacagtagagtcaattggagagattcacttttaaaaatctctcataggccatcaagatgactcagtggtaaaggcacttgccaccaaggctgacaacctgtgttcaattcccagcacccaccgagtaggaggagagaactgactcccacaacttgtcctctgatctccacacacatcctattggtacacacacacacacacacacacacacactcactcacacataccccacagagagagagttttaaaaaatcttaaataaaaattagagcctctcccaactctaagatttaaatataaacagtttcatctctatccacctggcttcctggtgttcattttcttgaattgtgtggcattgagaattccaatttgtttatgtttgtatggctgttctgtgtgtattatgtctgtgcaccatatatgtatagtgcctgatgaggcctaaaaaaggtatcagactccctaggactagagttacaggcagttgtgagccaccatgtatgtgggtgctaggaattgaaccctggccctctggaagagcaaccagtcctcttaactgctagccatctctccagccctaatctaaatctttatctcaatattttttcctatgtacatagccttttccttgtcttgtgtctataaacccacaaagcagtatctagtgcctggaaaatccttaaaactcacttaatttggagtgctggttttggtgtcttttgctcatagtgcatccaaaaatccagtggactcttgtcttgtgagattgtcacagtctgacttactcagctgttttgtttcccgaacaggttcccagttgatattttcttcacaccaaagcaagaaggagatgtgaacttcaatttgatctgcaatataaaaaagaaagctcaccctctgacactcaacgtcaaggccgagggctacactatgaatgctgaggtcaagtgcagagacaggatgggcaccaccatcctcctgacatccacccaggtcaacaccatcaacttctacgaggtaatggatgacaaggacctattgctcttcccttatctagggaatgtgatagatacaatgagtgtgagctgagctgtcctgtctcaaatactagagacagcagataaatccatccccagggttatgtagttatgatgagaatgggagagacatgaatacttgagatttttactgccaagaaagatctaagaattaaattaccaacttatacttggaatatgagaggaccctaatacttggtgggggttttgggaatatccagtcccattcagctaatgacacccagcttattaatgtcactctctacccttacttcccaatgaatatctctccctagacaagggatttgtggcttttttttttcatccaccatgctgttctctccgtctttcaggtggagttgaatgaatgtgttcagtgtgaattcagtttcatcaacacgggcaagttcaacttcagctaccaggcagagctctctggaccaaaactcctgttgcaatacttggacttcacacccaccgacagtagcgtagacgtgggtcagtctgaaccggccaacctgtcattccaaccgtatcagaagtgtgtcttgaagggcctggaactcaaaatcaaggtgagaccattcaatgttttccaaacgccagaagaacccatggcatgttgccccagctggatagttgcagcagccccaacagtgtggttgccttggaaatggccctcaggtgttctggaacagaggctgcaccataagataagcagtggaccatctgaaagaccccaagaggagcccctcactcaggcctcaggataatagcagacccccaagaactcacgatagaccaagcttgctgcaagccacatgaggctttattcgggaaagccagagagagctctggggacgactcatatcccacacaggggtagaggagtcgaccctgagggaaaaggtgtcccagtttttataggtcctcaggggggaatggagaaggggggtaggggatttccagatctaaacaatgtctattctcaagaaatgggtatgggaggggtacaaggaaagagtctggtgcaggtatagcaactctggattggcctggctgtggttgctggggagattttccaactctttcccagcaaccaatatcacaaacacctggcaatgggcttcatcagtgggcacacacatgggttcatggaacggtcaaaacattggcagacacacgggttcaaggagtggccagagcattgtgcacctctatttttctaaatcagtgaagctagttctgctaactatgaaatctattttgccaatttcagggcttctgtgaccttttacattctgtcaggatctttcacatccgcacactgtgacactacctagacactacaataagtgagagcgttggatggggcagggaatgtatacacacaaccctttccaagataaggtatcagatgaagaatcaaacaccctaccaccatcaccaccccacctcaccaccaccccctagccccccaacccatacacattaaataaataagtaatgactttgcccatttagtcaagataggatgccacggccacggacgggcctgtcggcctctctcaatccgtggggaatcaggggttccagcaggtgtacatggagttggtgagaactgacagacagaataggagacaccaccaccacccttttctcttttttggtttttttttttctcttcattttgtttttttaagagggtttttgttgcatagccttggctttcctggaactagctctgtagactagacagaccttgaactcacagagatctgcccacctccaagagctgggattaaaggggggcaccatcgccaccctgcttccctttcatcccttattaacaacctatggcagaactatatccagtggtggccccaaaacataacggaagatgagacatcaagccttgcacccaggctccttggcaaccccagtcccaccctgtatgatcactagccatttctgccaactactctgccttcatgaaccactgctgtaggaacaaaacaagagccagtgtggattctgcttagagtagctaattggaagcaaattcattcaaacctactgaaaccgtcctttccttcttgccctggggatgcaatcgctctgtcttcctgcctctaactacagtcccctggcccatctctccttgcagatcagccatggcccaacattcgtatgcaacatcttaggctgtgctgtgagcccagctgtccatttctccttcaccagccacaactttgggacttgcttcatctaccaagctgggatgcctccatataagcaaatcctcgttgtcaccaacaaagaagaaacatctatgaggtaagtagtcttcacagagacacaagataattctacaaccacgtgagaattctacaggttgaagtcctgtcttccggtcttctggtctcatctccgttgctgtaataaagcactctaatcaaaagcagcttagcagggggatgaggttgggtatttcatctgacatctccaggtctcagtccatcattgagaaaagtcagagtacaaactcgggagcaggaacctgaagccagggctacttgctactactacatttagcactaccaccaaccagggaacttacaaccaaggaagtacagcagaagccacggacgaacactgcttcgtggcttaccctgactcacgtttagctcactctcttaggtagctcaggaccacctgggtagggatggtgtcacccaccgtgggttgggccctcctgtatcagtttacaatcaagataatccgccatagacacatccaccgaccaacctgctaaagacacttactcaagtaaaaatcttttttttttccccagtgattctaggatatgtcaagttaacaagtactgttaactagttcaccttaccaagacagaaataacagaaaagaatctaacacatgtggcatgaattctgggtccctgcccccactactaatatgaatacatggacatccatgattcctgctagaacctgctagacatcttcttcttgatttgtagagggctgtgccagatgactagctaatgcaaagtcccatagcttctgtttgtttcctcgtgcagcagatttggaaagaagcgtaagcagtggttttcaacacgttgtggtatctccagccataacgttatttaattgccacgtcataaccgtgatgtccatgctgttacaaagcatgatgtaaatatttggtttacaggatatctgatatgtaatgccccccccctcaaaaaggggtcacaactcacaggttgagaactgctggtttaggacacaaaaaagtgaattatactgcagtaaatagcaagtccgtactgagcctagatctctcagatcaaacctgcctgcatcatccctaaggaacatttcagtccaggtctctatatcgcgcttttcagaccatctaacgagagaggatctagttcagtcactggcctgctgcgttcatgcacaaatctttatactggtcctaccagagaacattctacaatgaaaaaagtattgctatcagtattgtcctgtgtgatggcctttaactctaagtggcttagtgacaccaaagaactccttttaatttattaacttaattgtaattttaactataattatttcatgtatcccgtcatgaccatgcacatcagatgacacaaatctgagttcaaatatcatttctttcttaactgtgacactgagcaaatttgttttatcttactctttgttttcgttgtctgagggaggggtgcatattctctgttagttttgagatggagtctcactgtgtagcccaggctggcctcaattcatgatcaccttatctcagcctcctaagttctaggattgctgatatgtaccaccatgctaagcccatatttaaattttttaaattctctgtgactctgtctctttgactgaagagggaccacccacctggaatcagtacttagaacagtgcttggggcttaggaggtgctcagttaccgtttgctgctgctgctgctgctgctgctgctgcaattattattctagatagtaaatcacaagagtgtcatttagtttcaagccactgagacaggagttaagagcactttctgctcttacagaagacccacattccattcccagcacccagtctgtaactccagttccaggggatctaactccctcttctgacctctggcacaaccatggcatgcacacatgcatgtaggcaagcagtcaagtgtataaagtaaaaataaatattttaatcttctctacctatagtctttcacaatttgagctctgtgtgtccacttagctgggctccttctctaaatatacatcaggaaaatgaggggaagttctgctaaaaaaaatataggtgtcttcttggctgtgggatgggagtagagtggggatgatttttcctctgacctccaatggcaccaggcatacacagtgcatgcacacacacacacacacacacacacacacacacacacacacacacaggcaagacgctcatacatataaaaacgaagataaaacgaatctttttaaaattatttaaataagtttttttgtctttacttttttcttctttttttgattttttttaattggatattttctttatttacatttcaaatgttttcccctttccaggtctccccttcaaaagctcccatcccattccccctccccctgcctccatgagggtgctcctccacccacccactcccatcttcccgccctggcattcccctacactggggcatagaacaccctcaggcacaaaacactttcttgactttatctcatttaatccctatgaagcagctgccactaatcccattttacagctaagggggcagatccaaatgtcctgagcgcattgtcccaggtcgcatggctagtgattggcagatcccgatccagactcctgtctgcccaactctggaacacacagttgcgttcccctgagccttgtcacacggtaacttttgaagcatccctgtgagagagtgcagaaccctgaaggcagtctttaggaaacagagcatcggctgagtgcaagcgtgagcctttgggtctgagacctgctcccacctccatctcaggatatgacctacgagaacatgctctggtcaccgctgacatcccttccagctcttgggctgactctgctgactctaggacagcggggcaggaaatctgtcaccttccagcccagaagcatagaagacccatcagtaacctccaattctgccttcttggtgcttacacccatccctcttggtgttcctcagcctagattgtttgtacaccaacaccccacacatcgaggtgaacttcaacgtggacgtgataaagccagggaagaccctggagatcccaatcaccttttaccctcgggaagctatcagctaccgagaactcatcccctttgaaatcaatggactctctcaacagacagtggagatcaaagggaagggcacagaaatgaaggtaaaaggcagtgggcggggcttcaggaccctcctccctcttcccaacagtaggcggggcttcagaaccctcctctttcctcttcccagactctagcccactagctcattctagcttgctcttcactgctcctaaaactgttccatcccagatcccggccctgccaagataggatccctaatcataccaagtgggaaggaatttctaaactgggctcaagtgaatcccggctcctactcagaatccgattcactgtgttatgaactcagacaactaacagcaagcactaaagaaatgtactactgtcttcttggagaagtgtcagatgtacagcatcccacttgagggcgtgtcctattcagacacaaggttcacctgtgaaccatccatccttctcaccctcggtggtgaatattttagttccccggattatccagaaacttctcctgccaggtgacccaaatctgtagaaaatggtcctgatagtcaccctgtcttcctgatacctgataactacatctggtatttgtctggtggcagtatttgcattatgactgaaggtttaagaaaaaaagaaatccaagattctcaggaatgcataagatattccaacaagtggggggagggtatggggggggatgtgtggccgcctcccctcaagtcacagggaggacattgccacctggtgtgtcttgtcaacacaaagcaggctagtgatgaaatgaaggtatgtctaacctgaagcagataggtcactgagagagggagctgcccttgctcctgcaggagacaggcgtcctcactcttgtttccccgctgacaagccctacccttcctcctctctctctggtcacttcagcttttagtcctagacccagccaacaggatcgtgaagttaggagctgtcctgccaggacaggttgtgaggaaaacagtctccctcgtcaacaacagccttgcccagctcacctttaatcactcggtcctgttctctattccagagctccaggaagccaaggtcagtgtaggaaaatggggggggggggtgctcatggcggagggggggaggaaaggggggattgcaggatgcagaaaagctggctagccagagcataaaacccagcaaatgtctcactgggacttcactttgccgaccaattcacccggatgagaaggaaaactcctcgctcccctttcctcattaatggaaaaggaaagccctcagtgccagcgggtcccagctcttcacagaccgaccgaccatatgagtgtgtgctttctgggtctctttatcgggggtgggaagagttttttatttgatgtgtatgcatgtacctctgtcagacacctttaccctcagatgcctgttatcagattgccccttagagagtaaccccggttgttacggtgacctgtcttgagccattctcctcagggtaccttgagccactgtcctcaggctagctcccaaagtcaccacattcaggaaaccccccgggactgcttttctgttcccgatttccccagtgcttcctctctatcactcatatttctcactagcaaacaaaatagtggtttcattatgactttttatacaaatttgtgtgtgtgtgtgtgtgtgagagagagagagagagagagagagagagagagactgtgccttgttcttattccccatctccaattgccctcgtctgtccccattcacccactcctgctcttcccgtcccctccccagagagtctcccctctgctttctcctcatgcccatgtgtgtgcatatgtgtatattacatattaaatttagatgagaaaaagcatgcaatagttgaatttctttcttcccattatcctgccttattccccatccctactccttagacctctacatcatggcacataggcctcctgctccttgtatagcacacatacacatacatacatacatacatacatacatacatacaaattgagactctgcatatgagaggaagtatgattcttgtctgtctgtgtctggcttaattcacttaactcaatgctctcccgccagcgagcacttcttgagaaagactggattgatgtttcttgtttcatgtttcctgctgctgttttgtctcccgcggaaggaggaggagggaataaatgcccacgaagagctgaaaagcgggacaggacaggaaattaacatttgctggatccctgtcctatgccacatattttatacacatgatcctgcccttcactgagtcaaggggatggtttgagccacttattaaagatgacccagctggtaacatacgagatttgacccctgggctgagacagtctcagcagcagggcctcaggctgctgaggtccgagaaacctgcctgctatcagcttctgagccagttatctttctgaccaggtcatcaccttggagcccttccacacgatcaccatgaagcctaaagaagtctgtaaactagagattacctttgcccccaagaagcgagtccctcctttctctgaggaagtcttcatggaatggatggggctcctgcgtcctctcttcctcctcagtggctgttgtcaggccctggagatttccctggaccaagagcatcttccctttggccccgttgtgtatcaaactcaagccacgcggcgcattctcataatgaacacaggcgacgtgggtgcaaggtaggaccagcaagggtgtctccaatcagatgctgtagcagacagctgcatctcctcacctcatatgaaacatcacagtgtcagctactaccatgatgacatgaaaaagaatattggtgtgtgcctagtatatgcccattacacagctcatccaacttgatctctcaacaataactctagacagctaatactataatataatctctgtgattgattgtgagataatgaggcaggaggattttaaaatgcatagtgatacaccctgtctttaaataaaaaaataaaaataaataaaaagagctaaggccgagcatagtggtgatacaaattatataattccagtgcttggggactggaaagtggaagcagaggggggattaagaattcatgctctggctctgtatgttcaaggccaggtcagtcaggactataggaaaccttgttaaaggggatgggggctgctggggatgttgctcagtggtagagcaattgggtagcatgtacaaggctctgagtttaattccaagcatcgcagagagagtgggggagaggagaggagaggagagaagagggagggatgggggaaggagagggagaaagagagagggaaaatacggacaaagtgtactccccaggcatcattcctatcagatagaattagaaagaaaaaaaataccagtaagccaattctcaatctgttttaatataaatgccatatagaaagatagagtagggctcaagagatggctcagcagttaaaagcactgactgtgccgggcgtggtggtgcacgcctttaatcctagcactcgggaggcagaggcaggtggatttctgagttcgaggccagcctggtctacaaagtgagttccagggcagccagggctatacagagaaaccctgtcttgaaaaaccaaaaaaaaaaaaagcactgactgctcttccagaggtccttgaaaaattattgagtaactttcccccaaaaccacacacgaggcaacaaggaagtatggatgcaaggttgggcagcttacacgggaccaaccccgtctctaggagaggtgctttagccgcctcacttcacaggtgtagtgagatcctcacagaagaggctcagagattccacagccaagaaatacaaagacagttccagaacccaggctctctcctcttgctgctcatgaatcaacatggctgaccaggctacacattgcacaccccagggctcctcaccatacagactcggtgttacagcaccaagagggttattaattatacggtagcgctgttttggaaatccgagtgtgtgccgatcatcctcggccttctacccataccaagggcctaaccacagggatggccccgtggagccgtcaagatcccagtgccacctaacaggcctaactctcacctgaagggcgggccaccaccctccaggatctaaacaggcagtgcaaagtcatagttaaggctgtcatctggaaagactgtggtccctaatccagtcacttgctagctatacaatcttgggaacacatgtatagtatgtgttcatatatacattccctagcttgtcacctatggatgatacatgcagtcacttctccccatccctcccccacccccgcccttgtcttagtcaggatttgtattgctgcatgaaacatcatgaccaagaagcaagttggggaggaaagggtttattcagcttacacttccacattgctgttcatcatcaaaggaagtcaggactagaactcaagcaggtcaggaaacaggggctgatgcagaggccatggagggatgttactgactggcttgcttctgtatagaaccagcccagagatggcaccacccacaatgggtcctcccaaccctgatcactaattgagaaggtgccttacagctggatctcagggaggcatttcctcaagggaggctcctttctctgtgatgactacagcctgtgtcaagttgacacaaaaccagccagtccaccactgttcaactctaagaggttctggaacagaaactccttccccagagagtgatctaggctctctaactcacctctgctcggacagaacttcctcctcctacagcctatggagtagtcaaagcagggactgtcttgtcaaaagtcccagtgaggtttttgatttgtttttgttttgttggtcttctgttagtttttgttgtgttggtttttgttgtgttggttggtttgggttttgcatacccttagaatattaacacactccctctcttgtcttcttttcccttgaaaaaaaggtttaaatgggatgtcaagaaactcaagccccacttctccattagccccgaagaaggctacatcatctcaggcacagaggtggctctagaagtaacataccaccccactgagatagggaaggagagtctctataaaaacattctctgcttcatccaaggaggaaatcctctgtgcctcaccctgtctggaacctgtgtgggaccacctgtggtaaaagaggcaagtaggcattgcatggagatggaccaaaggcaggtggtgagcccaacaagagaattcagtctcaacacccacatcaaaccttcggtcctgctcctccctgccacagggatttgcatagaccatgcccactacttgaataatctttcttccctcttggtttacttaatccatgttctttcttcaacttttgattcaagcgctatatcctccaggaggctgtgtagatcaaattctgtggtaagagctgttagcacagactggagcatagctcagtcagcgagtgctgggccatatgagcattcttttcctcctcgtggggcaggaagactttgagccttgagtagagggatgacaatgtttgatttgcgcttcagtagaatcaaacaagatgttaacaggtgtctgcagaagagagaccaattagaaatactacccctagatgaggggagacatggcagtgacttggatagcaggggagagcaggaggtgactattgtacagctgatgagttcagctgggctggctggccaaggggtttcagggacccacctgtcttcatccccaccgtgctggagttgcagacatacgccctgccacactgggcacgcctgggtgctaggttgaactcaggtcctcatctctgcactgaagcgatttgactgacatggtgtctgtaaccactacacaatgctgtgtatagttgtgtgcagctatagggaaaagggaagtcatgacatttgcaggaaaatgtatgcaactccacccgaaataagaaatgaaatacctaggaaatattttcggctgaataggggggagagagattgtgcattggaattcactatgggaaacacttgaaacctctacacacataaacacacacacacacacacacactctgtagctccagacccaaagatgacatgggaggtgattttcctgcttcctccaggtggtgaatttcaactgccaagtgcgctccaggcacacacagaccatcctgctctcaaaccgttccaaccagacctggaacctgcaccccatttttgagggtgagcactgggaggggcccgagttcatcaccttggaggcccatcagcaaaacaagccctatgagatcacctacaagccccgaaccatgaatctggagaatcgcaagcaccaggtaaactgaggcctccctgcctgctttcttagcataggggaagcaaggagctgggtggacagtggctaaaagaccattttagagctcagagttaaacgaatacccaagtaaggagtgggtatctagatcatgggatgataataatcatggatgatagggaaccataacagttggcaggcagtagcttgcccccttgcctacatttctcttagaatcctggggcacggctatgaaaggaagccctaggactaaaccccgagcagttcctattcagtttacgtgcatcagtggcataatggcaactgtaataaaaatcagaagagagtcagggagatggctcagcccataaatgtgtccaccaccaagccttaccaccaagggtcattcctcaagaccaacatgttataaggagagaacttatgactctcataagttgttctctgatttccatatatgcaatgtcatatgtgtgcatataatgaatgaacgaacaaatgaatgaaaatgtaatttaagagctggaaagatagctcaacagttaagagtacttgctattcttacagaagacctgagttcagctcccaatacctatgctgagaggctcatagccatctgtaattccagtttcagcggggatccaatgccctccctctctggcctctataggccctacacacctatgtatacatccacacacagacacaaaaataaaaatgaatcttttcaaaatctaattttaaaattcagaaaaggaaagaagccagtctttgctctgagcagcaaatggtattctcttcagtcttcactatgtgtccaatacagcaagcttcggtttctgtgagagacgctgtcttaaaggaataacatgggaaacaatctaggaagacagtgtcgtcctctggactcccatggttatacacaggtgcactcatctacatatgcaacacacacacacacaaaccaaaaggtaaagtagaagtgttaggcttacttttcttctctaggccaggcagatgtctattaataaagggtctactatgtcattcttatttgtcacttcttcttccaagggcactctctttttcccactccccgatgggactggctggctatatgccctgcacgggactgccgaactccccaaagctgttgccaatatctaccgtgaggttccatgtaagactccctataccgagctcctgccaatcagcaactggctgaacaagccccagaggtgagagtgtggggtgagcagtgagggggtgagggagcagatgacttccaccatccagcttggtccttcacctacagagaatgtcagatttagggggagtcagaaacacagtcctcaataaagccagtgtctcatgaacacgcaggccttgccttcttgctcaatgttgattcttacagatcctacatcttacagatcctagagcactgcctcacacaaaatacatgccccataatagttctgatggtcctaacagccaacacctttgttgttgttgagtgtcttatagcccgaactactagccagagaagagggtccctcaaagtgtgctgacagtaggagatagaaaggaatacagggactgaaagagatcacgggcaagtagcctcatcctttccttccaaagagaggtgactagaagtgcgtctccctcgaggccacctgcttggcatagtagacagagctcagacctaagtctgcaccctggttttgccaggagctacgcatgtcgtccgagtgcgttatcttccttctttgagcctctctttcctctcccataaagcagaggtgttgatgaagcaaacctcctctggacattgtgtcagctgaatatctgtaaataacagagagaggggctgctgggtaccgggctcgataaatggcagttgctgtcattcttagtgacagatcaaagactggaaccacagacccacacaatcttcatgaaaggaaaagtagacacagcccctttccctcccatctttcgacagtttcgctgtctctcagtgtctcttgtttctcattgcctctcttctctcctgtactgctccagattccgggtcattgtggaaatattgaaaccagagaagacagacctaagtgtcaccctgaagggccttgattacattgatgttctgtctggctccaagaaagactacaagctgaacttcttttcctacaaggagggactgtacactgcaaaggtattgccacgtccaaggcgcctccccaaaacacggaagtttggtcctgggatgttagagaacagcagatgctgtcctccaggcatggtgcctgtgccccatagggttcactatgttctatgttgcctaatccagtcatttatttaggtatccattgagcacatagccatgttcagtgctatgtgctagcaatacagcaatggccaaagccaagctctgttttcaagaagcacagtctagtggaggagacaggcttcattctatcaatgtgtaactttctaatcagagaagtgctttgaagcagggaagtgtatatagattcatagatcacaggagtcaggcctggaggcttgagtgtttgtttgtttgtttgtttgtttgtttgtttatacgtagtttttaaaactattattagtgatggaatcacaaagtgaaagattttaaagtatacacttaaagcctttaaaagagtgtatgtaagggggctggtgaaatggctcagtgggtaagagcactgactgctcccccaaaggtcctgagttcaaattccagcaaccacatggtggctcacaaccacccataatgagatctgacgccctcttctggtgcatctgaagtcagctacagtgtacttatgtataataataaataaatctttttaaaagagagagagagagaaagaaagagagagagagagagaatgtaaaagccaggctgtataaataaaattgccacctagtaataataagattgatgattcaatgtgttaaaaagagcaaaagcttgagtagactcttctttacaaaatcaacagcataaaatccaggcatggtgtcacatacctgaaatcccagcacttaggaggtagaggcaggaggagtaggcatttggggtctgcctctggagttgggtactaacctgagctatatgagaccccatctcaaaagaaatgtgtttgaagtttctatttatgaatggccaacaagcacacaggcccagcttcccctctctccagggaaaaggaatcttggcagatgaccagagtcagccatagggggagagggctgcgtagagcagtcacaggtgagcccggacatctctccatgcaggatacttctttggacacgtgaccttggccgagacactaagctttgctacgcttccattcccacgtctataaggggcaatggcgttgcagatgcattgtgggatcgtgtgtagctgggcaagcactaatcccccagcaagcaccagatgctgtctgtcagtgacgtcattctcactgacagctctgggcgcaacagcaataggcgtgaagcccaccccagcttgaagggctgaggtcttgcttgttctttggggttgccttgctgcccctactggcaaaatgctaacaatgggccaagctgctccaaagggtcttctaaagccgggcgtggtggtgcatgcctttaatcccagcacttgggaggcagaggcaggcagatttctgagttcggggccaggctggtctacagagtgagttccaggacagccaggccaacacagagaaaccctgtctcgaggaaaagaaaaaaaaaaaaaagccagactacagaccctaaagagaaagaatgcctggcagggatcaaactggcaggtcatgccacaccctaccttacatcatgtgcccagcaaggctcccaggcagcaggggagcctgggtatggacagagaaccctagactaacctctgctctccccctgcttcttcccactcaccctgtgaacgcaggtgatcttccggaacgaggtgaccaacgagttcttatactatactgtgagcttcagggtcaccccttctggcattataaaaaccatccagatgacaagcccagtccgccagagtgtatcagcctccatcaagttggagaaccccctgccctactcagtgaccttttcaacagaatgcaagttgagtgacattagcctgccttcccagttcgctgtgcctccaaactctgaggtaggccctggctgccaggggacccttaagggctatgacagaggcttctacccatggagcctctggatctgtgttctgcctagcttaagtgtgggccagccctggtagaaagcaagaagaatggcaagggacaggcagccttgtgttcctttcttctgtagccaaagtcttcatgtgaactagggacatgtggctttggtgtggacaggtacaatggacttgtataaaatgactctgtctattgattgttcaccttgttcaaaccaaagggaaaacatcttttttgctaattataaaagtagcacagagctagaagtggaccttagtggctgggcacttgcccagcatgcacagagtatcctgagttcgatccccagttcacacacacacacatacaaaggagcatggatcttagtgtgcaaagaaaaacaaggtgtgaaaagtatcaggataaaatacacacacacatataaacacgcatacatatacatacattaacatacacatacatatacatactttatacacatgtaccatatacacatatttatatgcatgcatgcaaatgtacacacacatacatatatacacatgcccatgcatatacacatgcaccacacacatctttatatgtgcacacatgtacacacacataaatacatatacatacacatatgcacacatatatacatgtgcccatgcatacacacatgcaccatacacatctttatatgtgcatacatgcacacacacataaatacatatacatacacatatacacacacatatatatgcccactcatatatacatgtagcacaaacatatttatatgcacacatacatatgcatgcttctatacttgttgctgtacttgcttattcacagaatgttctggagaggcacacaaaacctctgactgtggttaggagaacatgagccgggagaaaatggactttcctatcagtttatcattccaaaattcactgtctaaatgttattgaaatccctgctctaacgtccctcctcagctcttgtccggctctgccttgtccccttcactactccagcctcttcctttgcctccaggatttaacttagtttcctttgcacacctgcccattgtcagtggggtttaatctgtcctttgtctcctgtgtctttggtgtgatccagtaagctctactcagagatttctctccagctgggctgtttcagaagtaggatccagccattggtcagttcttgtccatggtgttttgctttaagttgggtttgggttggcttctctgaggcagtgtctccctgggtcacccaggatggcctcaaactcatgatcttcctatttttgtcctagcctctcagtttttgagtaatcaaatgttctctactgcccccactaggctaattctatgactgcacctcagagtcaaacaaaccagtcctccagcttcccctgcctttgtcagattatcccaccaaggtttccaggtcacgtggatcccctcagttaaggggtgagctgggttctctggctctcagtgttgatgatcccaaccaagcaggagctagaatgacaccaggttcatgtcatttggctctcccaacgtttgagtctgaagttgcctttactctctgtttcattatagacgttagcttgctcttgttattctgagcctacttgatctcccatctctgggaatagggaattgatgtgtcttatgcacatcagcttagagaagggcttgttgacagcaagtaaagctgcagccactgagttaactctcgttaactctcgtgatggcttatactcttattactattcaggattatgtcagctattcttgactctttatttctatgcaaatcttgaggccaagttgctcagaaaaaaataaaggcaaagaaaagaactcagggattttttaatggaattccatcgaacctacagatcatcctaagaatcacttatctgttgtctggtgatccataacaaattactctccaatttagcatcttgtcaggcagcaagcgtttgctccctgcacggtggcagcctggctgggtggtctttgctcaggggtctctcaggaggctagagtcaggcagtcatccaaatatctagtctccccacaccagacactagataatctgcttccagactgggacttgtggtttctgggaaggcttttagctccctgtgggcagttggctagggcctcaattagtcatcatgtggacctcttcttagagccttttccaacatggcctacttcccaagagtgaaagatgtgagggaaaggacgagcctgcaagagagaacagagtagacaagacagaagcttgcaggcatgctccttccctgcctattctcaagagtgacaaagtgcttctgctttatctctacccagccctggcctggaatttctttaaggaggaaaacaattagaagctctggggtttccaccccaagccttgtgcattcctggaaagctttgtcctactgaactacagacccgtttccccatcgcacctcacccctgcttttttgagccagggtctctctaagttgcttaggctgccctggaactcactgtctaacctaggcgggttttgatcttgtgctcctcctatctcaggctctcaggtagccagagcaaagaaagtttgactatgctctttgctcaggcatgccagggtaaactatatttgttttttttttgttgttgttggtttttttttttttgcatttgtctatttcacgtccctttgtattataaaattatttctgtattatgttctttttgataaacatctatggctttagtgatacccctttcattctgattttttttcagtaagagttgtttttctttcttaattattttaatgatgcgcacattcgtgtctgcatgtgggcatgtgcacagaagtacaggtgcctgaaaaggttagagctgttggatccctaaggagataagagccacctgacgtgggttctgagacttgaaccctggtcctctggacaaacagtttgcattctgaactgatgagccctctccccagcctgtgtttgttttgtgtttttttttcaatagctactcacagcaaaacatttcaagctttagagaagtatataaaatagaaagtttaaagtcctatacaatttcccccaaatgtaacaccaaaaccagctcttctaacagactcttttctacaagcagacaacaaaaatgggccagcaaagtggctcagttggtagaagctcttacacacgggcctgacaacttgagttttggtccttggatcccaggatcaaaccagcagagaatcagttctgcacatgtgcacacaaacagtaaattaattttgaatcagttagtgtgagctttatattcattttttttcagacctcctgtctttttagggtcttactgctgtgaacagacaccataaccaaggtaactcttacaaggacaacatttaattgaggctgacttacaggttcagtccattatcatcaaggcaggagcatagcatcattcaggcaggcatggtgtgagatgagctaagttctacatcttcacctgaaggctactagcagaacactggcttccaggcagctaggataagggtcttaaaggccatgcccacagtgacacacccaccccagtaaggcctcacccactccaacaagaccatacctactccaacagggccacaccttctaatagtgccactccctggaccaagcatatacaaaccatcacaacccctttctttcccttaccatagcaacacctttcattacaattttacctcctccttttttggcagtgcatttgagtcattctctctgtgctattataaagaatgccctttagttcttgtttagttttataagaataagtgaaagagaatatttcccctccagaaaagatagagcccagaaagcttttgttctgagaatgcctatatgcaaagaaggggctgggtgacctttaacctcctgttgcttcccataaatgtgcttccctaggaaggagccaatacctgttccttagattcagatttggaatgggaaaatagttggaacagagaaagctagagagagatgaaagggagcgagaacaggctaacctgggctgaaattctccggctcagggtcagcttcagtattgtatgtgaagcatcatttttgtcatcacctgctatgagacctccggtaggtcagttggtgggagaggatgggtcaaatctccaacatgacaagagcctccgtcttctcttccagggaacattctcatttgaattccagcccctgaaagctggagaactatgcgggagactgaccttgcacaacagtgacttgggttactaccagtacgagctcgctctgaaggccttgcctgcacctcccgagaaacccgtccacttccagaccgttcttggcagcagccagagcatcttagcaaagttcaccaattatacccggttgaagacagagtactactgcaaggtgagcagtctgtagggcgagcaggatgcagggtgagcaggatgcagggcaagtgagaggactgcagagttagtggcccttcccttgccagaagtctgggttcaaaactagtgagaggctgagaactgtggtacattcttataattccagctcacaggaggtggcaggaggggatcatgaatttgagaccattctagactttatagtgagttctaggtcagtgcctggcctatatagaagggtgtctccaagggttcagagatgtgaaacccagagacagccagacactgtcatagtgaccttaatcttagagaactgaatcttgcctagaaacagatggccccagaacctgggctcttcttctgcagactgcctgctgttaagctggggttgaggagggaaactttgcttcccaccttgtgttcgaggggcaataaaggaagacagtatcacttggcatcatgaatgtaggctgtgggatcagacatgaatttgaatcctgatccatcactctgaacgagtaatttgcttaatctccctaaaactataaatggagataatggccctgtctcagtcatttcctgttactgttactataaatgaaaaccacagactggctaatttataaaatggttagagagagagagagagagagagagagagagagatttactcagctcacgactctggaagctgagtgatctaagatcagtgaactgcatctggaaaggacttcttgctggtgagtgctcccctaagagtcccaaactcataaggggtgaatctaagtgggggaggggagagacgtgaaacaggactggtttttatgaacagatacattctcaaaccattagcccaatcaatatgcacaattcatgcagggattcactcatacaagaggctgccatcatgacccatcttctctaagagatcccacatctttactacctcatcacagagattaattttcaacatgagttttagtgatgacattcaaaccatagaagcctgtgacccacagcctcacaggggtactgtgagcacttaagtgcatgtgtacatgatatagatctgcaaggccatccccttagcacatagcccatagcaagcattccatatactttggccattatagcagttagagtgtaagatggaaaatggaaataacagcaaatgggagagttggactgtcacagtcacttggggaccctgctaaagaacaagtcctaccccaaatgcttctggtcagagcatctgggactcatggacaattaaaggtgctagggtacaaatggcgcctttcagtcctgttcaagccagaatgccccatcttccacgggaatggaaggagagaaaaactagatatggagaacagtttcagtcccctcactaccagcagcattatctctggctatatgtcttgaagcacatcgttaacgtctcttggcctcagtttcttagtagcaaagttggggtcatgatgagtaatacttacctgcaaagacctcaaccccacaatgtataggacattacattgcagcctgcctgcctagcctcacacaaacgcaagttctttgctatctaaaaatggaaggactcagcttgggttccccgatggtctctttaggaccctgtgtgagtcaaggtactttgtttccctttcagactgactgttctgacttccacacagaaaaagttattaacgcagccccaggagcccagggtggcactgaagtcagcgtggaagtcttctttgagcccagccatctgggtgagactaaaggcatcctgtgcctatcgtcactcataggtggggaatatatcatcccactctttggaattgctctgccccccaaaccccaaggtcccttcctaatcagagccggatacaacatcatcatccccttcaagaatgtcttcttgcatgcaacaagcttctccttcattgtggagaacccagccttcagcatccgggctgcagagaccgtgcggcccaagaagatcaacaacatcacagtctactttgaggggaacccgtcgggcagtaaaaccccgatcacctctaagttgattgtcacctgccctcagtgtgaaggcaccgaatctggaatcaaatgggtttattatctgaaggggatcaccccttaggtgacaactgtgtcaactggcggccttccactcagcctatgagccatgcctcatgctgtcccaacaaagaataggggaattttccaaggactttcttgtatgtgtttagttgtaagagaagtgatttctatattatattttacaagcacagatgtaaaatttatgttccacattaaaatttatagtggcacacaacagatctacattcaggctaaatgaatcactggcggtctcaacagctgtgctcgctcccccacacctaagcacgctgaagtgatcccagtttgtaaggagacacgggtaaccccactcgggaccttcacgcagcactaacaagcgtccagagcaaggagcggctgacttttcctaaatgtcaccacccccagatataactgtatttcaatgtgatgcctctttttgctctctcataaaagccaaagaagtagtgtctttggagtgatgaacaggtcacactaggagggcttatggcccacactctacctcccttactgttgctcttgtgttttatatcatcagcctccagatcccatgtctattgcctgcaggaggtaagtcctcattggaatttggatcctggagaatgctaatggagaccctcccctctccacctcctcccctccccagatatgaatacagcagtcagctggaggacactggttctcagctcatctgtccacacccacctatctaattctcacccaaaacctaccctccccaaattctgattgaactgagctattgaacatggctatcatattatgtatatatatatatatatatatatatatatatatatatatatatatatcttatattcttatacatatatacacataagattgcagggtgagaacaaggaccatacagcaaacatgtccattcatgtgtgtgacttcatctcagtcacaaatcctctccatgataaggacctccttcgattttctatgtttgaaactaccactatgtcacatgctcttagagggtggctgcctaggtgagtgtctttcctgtatgctcctcaggaagttccacccacacagagatgtggagcatctgcctcattccagaggcctaactccacatccatctctttcccccagggcctcatagagtctattaataggaccaccaacctgtgggggtcatgtattaaattaatatgattaaacactggccctggagtagatttgcttctacagacgcctaactctcaccaagtgtcccagcctcctctggcttttctaattccaggcagccccctgcaagagagaggggatgtatgaaaacagatggccaccgggaatgaaggctctaaagaagtggatgtccaaatggtccctggaccatccccagaggcagcacctgggaagttactaaagagccaaattcttgcactccagcatagacttgttgagttagaaactgtgggctacaacccagcaatgtgtcttttaataagcccagtacttattataggcatggaggggatagtttaggggttctctttggttggttggttggttggttggttggttggggttcgcttgcttcagctcttttttttttttttaagatttatttatccatttaatgtatatgagtacactgttgctgtcttcagacacaccagaagagggcatcagatcctatttcagatggttgtgagccatcatgtggttgttgggaattgaactcaggacctctggaagagcagtcagtgctcttaactgctgaaccatctctccagcccgtttcggctcttttaacacgggatctcaacacatagctcaagtcggctttgaactccattgctcttgcctcagccttgtgagtggatcacactgtgtgatcacactgtgtgatatcacactgacttaaatggtggggcgtgtgtgtgcgtgtgcttgtgtgtgtgtttgcatttacacatgaatgtgcatttgtgtgtgtatatgcactggggtcagaggagagcctcagcccttgccttctacctaaagacagggcctctcttgttcacttccccttgtgccaggccagtggcccacgagatacagagcttctcctgtaatagcttcccatctcccagcatgggcatgttggaattgtctccagtttttagttaggttcttatattcaaacttagattgccagacttgtgcagcaagtgatttgcccactgaggcatctcccaagcgcttaaagtcaggaaaaggaacctccattttttttttgtaccacctcaaactctcagccaatacatgctacacacaacgagtgccaagctaagtttttcctataatgcttttaaactatagttcataagcaattcatttcatagccaataaagatactactaatagggaccagcaggatggctcaacaggtctaacagcctgaattcaatcccaaggacccacatgagagaagagagctgactcttgaaagttgtcctttgtctcccacgtgtatcatgacatacatgctatagacacacatgcacatgtaatgtcataaaataattttttaaaagatacaagtaatatggataaagccaaaacctagatgacagatttttttcccccagtggtttcgttgagcaaaggccacactaagcaatctggaaggatgttgaaaatcagtgagcagctgctatgactggcagatacagaggctctataaagtcagcagtttcccaatcttcctttctgtcagaatctctggggaggacttgcaaaaccagattgctggggtgtttctttgacaccccagctgaaaattgctttgtctttgaagaaacccctttgattggggtacaacatcacctggggcttctcaactcattatgacatcacttgtacatgcagcagtgcaactgctactaacagttgctagagaaccattccaaagcctataatggcaagcagacaaaaatggggctgcaagacaaatcatcacaatgagaaagcaatgaacttgcagccaggcatatgagttaccctggagcctggaagagtcagagtagggagtgctggccagcagggtcagagaagaggaaggcaggcagagactgcaaaaatggccccagaccttcatttcacagtaccatggctagtcccggtatgaataagtggccttaattactctacattgctaacatatcagggaagtttctttctagaaacttctgacctaaaggaaggacaaagcattagtttggcctttaaggagaaactggtttcttagcaacctgattcagaatgcaatatcaggagaaaagagctcctgctggttggaaaagggaaaataaaataaaataaaaccctatgcagtttcaaatattaaaggccttatcatattgtgaatagtgcgacccttgggaaattcagttcatatttatgaaggagccaattccaaaaagcatagaaacagatgaaatatcctagtagacatggcttcactggaaacaaacgcaccctggagaaaacagacccaaagcaccccattaccttggtttaattttatcattgcatgaaccatcatccagccctgaccgtgtaaacttgcacagcattttggaatgtccttgacaagtacttaattcaagctaaaaggaggaagctagtagaaaacatgttttcttggggcataagtccttctacattgagccaagcttttgcaccggttgggagtggaggggctccttcctccgtccctgggttgtgttggaagaggttttggcacatgtaagaccctattagtaagaaagcactgtcttggattcctgttggttaatttctcctcgacttaatgaattttggattaggcccagcatttgtttactgtggacacgtaatatatgactgccggcctagaagcttaaattaatccaagtttattcattctcagtttaggtgggtcaagagtccacgcggactgggcagggttctcagtccagagagccacaaggctaaatcaaggacccgcctcatcttcctacaaagactggaataggaaaatatatgcctcgaagtttcccttgtgtgttgtcaaaattcatttccctgtgcctttagctggaactacactctcttggcaactgatgacaggggactgcactcagcagctagagaccactgtcattactgccatcggctgttcacagcgtgattcccgtggccatcaggagaatcttcaaaccactttgagttttcatcgaattatatcagccccacccacaatagtcccccccctttaattcagcatctgctacagacatttattacactcacaaaatctcatctgctccccaacacaataattctgtagttcattatatttaaaagaattttcacatccaaggactctgcctgttacagccctccactcactgtgtcttggaactatgggctgaagcagatgctctgctttcaagatcatatagtaaggtttacgtgtgtgctttttgctcgttaaaaaaatcataccatcttgggtctaacaacaaatgcagtactccttggactcaatggtaggctagtcttccctgtcctaagttcttgactctggaagtttttatgaatttagatacatcaccctgttaactgcatctttaatcactccatagtcataattccctctcccctaattttatcacactgatataatatctgttctctaccatttattgtgacaatccaaagcagctgttttccagagattccatctagacctgcacctgcacctgcccctgcctctgcccctgcccctgactcccccccccccccgcacctgcccccatacccgcacctgccctcagcaaatttggggctgctatctgtaacccagccctcctggttaccagagcataaacttgcactctgactcccacatggtgggctggtagccactgtcagcattgtggggcatccaccagagaagactactcggacatcagtttaagccaagtcttcattagctggtcagtgactacactgggtgtttgggatcccagtgtagccctgagcctttctcagaatgagcttttaagtacaaaaccgacatcctaggttgacattcttcagttagcaagaacagttaggcagaagcagaactacagaagccaaaaacaaggttagtacatttggagacttttccagaactatggattttgatggattaggcctttgtttttattttggcaggtggtgctgtgtgaaagctgagttttatggcctaagtggtacttccaccgtggtatcaattgtgacaaggtctaggggtctgttacagttagtacctgcaactttaggagataatatcacttttttttttgctttttattgatttttttttgttagtttcacaccatgtaccccagtcttacccatctccctgttccctcatatctgcccttcacccttgcacaagatgaaaaacatacatcccccaaaaaagcatagaaaacatctcattgtggaaactgtaccatgccacagtgtgtcccatagtatatgcctctgtccatacatctttatttgcaaatgttcactataatgagtctggttcaagatctctggcttctgtgacaccatcaataatggatcctcatcaggactcctcccagtcaccccgtcgttgccctgtgtcatggagttcctgtagctttaggacagcaggactggccctttcatgcagtccaaccattggcagatgataaagatttttgggtggggcatctcagagccctggatctgagccctgtggtagcagagctggccagcccaccagctctcccttatctgcaccaacagggcaaactccagcactgctctggccaggccaaccaatgccaccatcagcaggagacacggtcagctctcctgctgtcatgccctcagggcggggtcacctacatgcatgcctccagaaccagctccattgtgcccagtcaagacacagggtccttgtgctgcagctcgtgaggagctgggctggctcttccactctctcacccttggggctgactcacccatgtcttcaacatcaggaccagctccactgttttgcccaggtacagtgcagggcccactctcacaagtactacaactggcaagggacagggccatctcacctgctctactaccacaggtgattgaggagttggggggcatcacccccacacccatgccatggcagagtgatagggccatctctcctgaatttgcaccctcgggctggcttacccacatcccttgaccagggctagccctactatgctgccaaggtgaggcagggggtgaagtacgctgcagctggccagggatagggccaggtcacctgctctcatgaccccagatgggccagctcttccagttgccaagggtggcaaagaggcaaggtcgggggaaggtatcacgctccctgagccacctcacagaggactgaaacaactttggacaccaaaccaggatcaaaccaggatgaataaggaactgccatctgttttgcccccctgactaaaaacaacaccaacaaggtatctttctgcccattgccaaggggatgataataccacttttaaatggctaatattttaatatgtcttaagaaacattttaatctttcacttcagggcacaagcaaggatgaggtgaaagtttaagatttcttttaaaaggaaatagattcgagggaccagagagttggtttaacctgtagggtgttagccacacatgcccaaagacctgtcttgaaattccttgtacccacttaaacacctggtcaggcggagcttgtggtctctaactgtagcactgggaggtgagggaggtggaaacgggccagttagggc

SEQ ID NO: 4 - DNA, 1536 bp, Artificial sequence
  Synthetic polynucleotide fragment
gagctctgcaaattcttcctccaaaggaggccaggaggatgcctcagtacaatgtgggaagaaacagtgatgtcccttggctcaaaggataaggctctccacagaccttcttggagacatctggtctgagagcctctgctgctcagcgtgtgttgctggggctgggcaggcgggtgagcattccagctgctgacggtgcagcctctcccccgagctgagcatagacattttgggaaatcccttaattcctccattctgtgcaggcatatatagggagggctggaacgctagctcaccaccgcactgcccagaggctcctgtctgactcactgccagccttcggatcctctagagatccctcgacctcgagccaccatgaccatccttttccttactatggttatttcatactttggttgcatgaaggctgcccccatgaaagaagcaaacatccgaggacaaggtggcttggcctacccaggtgtgcggacccatgggactctggagagcgtgaatgggcccaaggcaggttcaagaggcttgacatcattggctgacactttcgaacacgtgatagaagagctgttggatgaggaccagaaagttcggcccaatgaagaaaacaataaggacgcagacttgtacacgtccagggtgatgctcagtagtcaagtgcctttggagcctcctcttctctttctgctggaggaatacaaaaattacctagatgctgcaaacatgtccatgagggtccggcgccactctgaccctgcccgccgaggggagctgagcgtgtgtgacagtattagtgagtgggtaacggcggcagacaaaaagactgcagtggacatgtcgggcgggacggtcacagtccttgaaaaggtccctgtatcaaaaggccaactgaagcaatacttctacgagaccaagtgcaatcccatgggttacacaaaagaaggctgcaggggcatagacaaaaggcattggaactcccagtgccgaactacccagtcgtacgtgcgggcccttaccatggatagcaaaaagagaattggctggcgattcataaggatagacacttcttgtgtatgtacattgaccattaaaaggggaagatagtggatctcgaccatgggaaatgtcagagtggagaaccacaccgagtgccactgcagcacttgttattatcacaaatcctattagtttgcagtgggccttgctgatgatggctgacttgctcaaaaggaaaattaatttgtccagtgtctatggctttgtgagataaaaccctctttcttgccataccatttttaacctgctttgagaatatactgcagctttattgcttttctccttatcctacaatataatcagtagtcttgatcttttcatttggaatgaaatatggcatttagcatgaccataaaaagctgattccactggaaataaagtcttttaaatcatcactctatcactgaattcctgcagcccgggggatccactagttctagagcggccgccaccgcggtggagctc

SEQ ID NO: 5 - DNA, 20 bp, Artificial sequence
  Synthetic primer
gcattccagctgctgacggt

SEQ ID NO: 6 - DNA, 25 bp, Artificial sequence
  Synthetic primer
acacctgggtaggccaagccacctt

SEQ ID NO: 7 - DNA, 1163 bp, Artificial sequence
  Synthetic probe for in situ hydridization
ctagagatccctcgacctcgagccaccatgaccatccttttccttactatggttatttcatactttggttgcatgaaggctgcccccatgaaagaagcaaacatccgaggacaaggtggcttggcctacccaggtgtgcggacccatgggactctggagagcgtgaatgggcccaaggcaggttcaagaggcttgacatcattggctgacactttcgaacacgtgatagaagagctgttggatgaggaccagaaagttcggcccaatgaagaaaacaataaggacgcagacttgtacacgtccagggtgatgctcagtagtcaagtgcctttggagcctcctcttctctttctgctggaggaatacaaaaattacctagatgctgcaaacatgtccatgagggtccggcgccactctgaccctgcccgccgaggggagctgagcgtgtgtgacagtattagtgagtgggtaacggcggcagacaaaaagactgcagtggacatgtcgggcgggacggtcacagtccttgaaaaggtccctgtatcaaaaggccaactgaagcaatacttctacgagaccaagtgcaatcccatgggttacacaaaagaaggctgcaggggcatagacaaaaggcattggaactcccagtgccgaactacccagtcgtacgtgcgggcccttaccatggatagcaaaaagagaattggctggcgattcataaggatagacacttcttgtgtatgtacattgaccattaaaaggggaagatagtggatctcgaccatgggaaatgtcagagtggagaaccacaccgagtgccactgcagcacttgttattatcacaaatcctattagtttgcagtgggccttgctgatgatggctgacttgctcaaaaggaaaattaatttgtccagtgtctatggctttgtgagataaaaccctctttcttgccataccatttttaacctgctttgagaatatactgcagctttattgcttttctccttatcctacaatataatcagtagtcttgatcttttcatttggaatgaaatatggcatttagcatgaccataaaaagctgattccactggaaataaagtcttttaaatcatcactctatcactgaattcctgcagcccgggggatccactagttctag

SEQ ID NO: 8 - DNA, 18703 bp, Mus musculus
  MISC_FEATURE (12088)..(12102): N = A or T or G or C
  MISC_FEATURE (14906)..(14906): N = A or T or G or C
  MISC_FEATURE (14908)..(14908): N = A or T or G or C
  MISC_FEATURE (14924)..(14924): N = A or T or G or C
  MISC_FEATURE (14960)..(14960): N = A or T or G or C
  MISC_FEATURE (15010)..(15010): N = A or T or G or C
  MISC_FEATURE (16728)..(16728): N = A or T or G or C
  MISC_FEATURE (16907)..(16907): N = A or T or G or C
  MISC_FEATURE (16983)..(16984): N = A or T or G or C
  MISC_FEATURE (18624)..(18624): N = A or T or G or C
  MISC_FEATURE (18636)..(18636): N = A or T or G or C
  MISC_FEATURE (18644)..(18644): N = A or T or G or C
  MISC_FEATURE (18660)..(18660): N = A or T or G or C
gcgagctcaattaaccctcactaaagggagtcgactcgatccatcattctgttgcacacaagaaacacacctcaacatcaaacatggacattacctcagagaaaagggttgggaaaaaaatattttttcaagcaaatggacccaagaagcaagctagtatttcattctaatatctagaaaaatagaccaaacttcatcaaaagagctgaggaaagatgttttatactcatcaaaggaaaaagtcaccaggacaatgtctcaatgatgaacatctatgccccaaatacaagggcattcgcatttgtaaaaaacgttactaaagcttaaatcacacatcaaaccccacacattaatagtgggagactttagtaccctactttcactaatgaacaggtcatccagacaaaagctaaacagaaataatagagctaacagacattatgactcaaatggacccaacagatatctatacaacatttcatccaaacacaaaagagaatatttgccttcttcttagtacctcatacaactttctccaaaattgaccacatattttgccataaagcaagtctcaacagatacaagaaaattaaaataaccccctgcatcctatcagactactatctattagagctgaatttcagaaacatcagaaagcctacacactcatggaaactgaacagctctctactgagagaagtcagggcaggaagtcaaggtgggtaccgggagggaagcagcagagagtatggagggatgctgcatactcattgatcctcatggcttgttcgggctttttttttttttttcttacagatcccaggatcacttgcccacagtgagttgtatcctcctcacatcaaccatcaatcaggtaaatgtctcacagacttgtgtatagatcagtgagatatatgcattttctcaattgagatggcctcccaaatgacctagcttgcatcaaaatgacaaaaggctaagcagaacacgagtaaggctcgatgctcctgacttgtgagcagtatgatttggtgatccggccttgagtggtggcgctgctgccattcctgaattacacgtaataaaggaattatgaaggaaagtgacatcagatagaaatccagagccacagaaaaaaaaaaaagaaaagaacatgaaaaattcaaccaaatggatctaacagatatctatagaacatttcatcccaaagcaaaggaatataccttcttctcagcacctcatgctaccttctccaaaactgaccatatatatctggtcacaaaacaggcctcaacagatacaaaaatgatggaaataaccccatacaccctatcagaccaccacagactaagactggtcctaaataccaacaaaaacaatgggagctgaacaactctctacttagtgataacttggttaaggaagaaataaagaaagaaattaaaggctttttagaatttaatgaaaataaagacacatcataccaaaacttatgggacacgatgaaagcagtggtaagaggaaaactcagagctctaagtgcctccaacaagaaactgaagagagcttacactagcagctcaacagcacacctgaaagctctagaacaaaaagaagcaaatacacccaagaggagtagaggcaggaaataatcaaactcagggctgaaatcaaccaaatagaaacaaaaagaactatacaaagaatcaacaaaaccaggagctggttcttcgagaaaatcaacaagataaacccttagccagactaaccagagagcacagagacagtatccaaattaaaaaaatcagaaatgaaaagggagacataacaatgaaatgaaatatatcttaaaataattattctgtctgttgaatattaagttgaaaatgttaaaatcatgttctacaaaaaaaaaaaagaaaaagaaaaattcagatatattgatagacagcctttggtttttcttttcttgatttaatgaaaagacaaactatgggctgggggaggcatggcagctgagtggcagagttacttgcctagcatgcacaaggctctgagttgagttccgttcccagtgatgtacaccaaacagacagtcagacagacaacagcaagcccagaaaatctaaagtaactcaagaccagctgataacctcagacctaaatgctctcaaatctcccctcctgtccctgagttatctggaactcttacctatgaagcaagagtcggtcaaaatgtaactgcctgggctccacctcaatttctgggcgaattccttggcagcttaacttaaagatggctggctctgggttctctttgatgcagcagacaatgctgtcttcaaagataccaactgcagtagggtaggcccatacgtttagtgcctggtgagagagttataaaggaaggtccatttacatggggatgtcagggcttgactctccttgcccctgatagaatcctcccccgcccccccccccccatgcctttgattgtacctgcttttcattgggtttcaragkcatgttgaccggctytaraaagtaggkgcttgcttttatgtcatgctggaaacaraagtatgcctctaccaccattggaraatcattcaggatcgtcagtgtctccatgttgccagggaacaaggatgacttatacctggagatgaacaggaatgggcatgtgattataagagagagagagagagagagagagagagagagagagagagagtgttcaggggtaacaggatcctttgaggtgcagtttaatttgaaagggcaatgtgactgtgctaaggtggtggaaggttgactgagaccatgacatctgtggttgtttcacttgcttctgagactactatactgtgatgggactccccaggccttggtcttcctagctgtaagatggggtgacagtatcccttaggattgattggtattaagtgatattgtgcactcaaagctcgtagaacaagtggaaatatcagatgtccaacaaatggtagttctagttcttagaaagaactcccaggaaagtgatcacctatccttgagagattatcatttgggtcacctgatacttgacatctgtcttagatctcattcacttccacaacactttcatagactgttactgttctgacatgaatttatctggccttgttcatatgacaaggttgcttctgctcccttatgtccttgggatgggtctgtagaggtaggcttcagggctattgggagacattctgttaaaggcaacgaacagaaaaggaaccactgaagaaggctgaaggaattaagagatgtacatcgtcagagatcacagcccagaccaggaaagctgagacagtctgagaacagctttgagcagtctgtgatggaggatgaaggagagagaaagacagattcaattcagagtatcagagtcaggcaatcctgtgagtaactgggaaaggggaggtgacctcagcatcttacccaccaccgttgcaatttggcatgatgctaaagagttcttgtttgttacccagttggtcctcccaacctgtgaggcagacactgttgtcttcccattatttttgtggacaaggttcaaggcttagagtgagtgagttagtttgcactgggtctttggaccatggtaatcactgttgttaattctagtgctaatttgggcagaatttccagagctctcccagaaggactcctgcccccatttccccatgaaatccatgttgctgaacccagtagatgtttgcacttccatcttcctgtagcatttgacggagttgatcgtccattcttctcatgggattctatggccctctttctgtgtctactttggactcctcttgggtaaggagaagctcttggtagaacagtctcttgtttcaccctctctccttgtgtcacactgtctgtagtggagattcttatcatcttgacagagctctcctgtgagaacccaaaccatatattctggtctctgatttatgtggttcctagagatatcttctaaacgacttggacttgctacatcccaaggtgaagtcttgattccacctttctgaaaccttgtcttcttctaggctttcccgcgagggaaaggggaagccaagttgtctgtgtgtcagagcagagacttggtacacgtgaattgaatcctcctggttcggagtttggggcagtgtcaatagaagccacgagtatataagaactctacttgcagtattcatgagttcaaccccaaaagtttgcaattgactttgaaataatgacatacttacttgtctcttgactttccacaaagcagtggcccaaagtaaaacttctccatgctcacaacatacttcttaacaacaacttcttttaacttcatgtctttcttcctctgagaaaacacaactctgaaatgggggagaaaggggtaaaaataatgatacacaaatgtgtatcctacaaacccagcgttcagtgtcctacaaacccagcgttccctgctcagtgaaggctcccatgtctgaagacagctaatgtggggatctccatggaagctttatcccctgctttctaagagaagatggaatgtcttgaacttgagaaaaaggcttccagggccgagctggatagtctgcccagaacaccccaatagaaaaaaagccagatgaatctctagaaaaaaactattaaatagtttcaggcataatagtcagcttctcagttcctcagtaaaacagggctcctgggcgagaattacacaaaggacaagctacagaaagcccctcgctccagcagggagtcaccttttctagtttgctcccctgaggtgcgtttatgtgagacctaaactgcacagggaagttcagtggctatgagaaaattagggaggttcgtgtaacgggaagacacatcctagagtaaaagtgctttcaatctgcttaattgttaactatgcagactcacttgccagaagaataccttttctctctatcttttaacttcatgtttattctgttttagtctggagatacccagtggtgtcatgccaaatatgttgcccttatttcaagcacgcgcatgcatacgcacacttggaggaatcacctttacccgctgagcattctctttggtccccatcttgttcaaagtgatttgsggtgtgtgtggagtgactcaaaaacacactttccaaccttttctttcamaaataaaatacacttacttggggtctctgcasatgtatgggtaggtgcagactccgcggcagtagagctggtattggcggcgggtcccaaggagctcgaaattaaacgtctggtcatagttgccaacatctagagaggagaagtgcactcycaaggttacctctccgtttggaggcacaatccaccggaagtgattcagccygaaaggaccghagagrcatkyrmagtmaccgtgtgaagaggacaggagaactgcttggsmcasgtastgcmcasctgsggttasgtatggcaggctataagccccctccctcactataaccctgcayytstctggtgtrcytgmcagstgtgctcccaacytggggcttcaycctccctctcccttgttcstgcaagscctacctgatgmacttctcctggagtgttctccatcacagctgttctggtctatgtcagacatcggamcmatgctccccgatgttcccccaggaggcctttcctgctggagtaagtgcgtcgtttttccttctgagtttcccgcacttgctctggtttgtctttcaatttctgtttgcttcccttaggtggagagggttgttcctcttgagcctgaattcaaaacgggcacaaaggcttaaatacttcgggcacacagtaaagacagaggtgcttagggcatgtctgcagtctggttggtgagcaatggtcgtaggaaagggtagggccagcagtttcctgagttagtgacaagatcagtgattctatgggtactctgttccctcaaggaggaagcagaaatgctacagcaattgcggggagagagagagcatatgggatgagtttcagctcctggcagggtcccaccatagacagctgggcattcaacttccttggcattgcctgggccaggttttccggccacctgccacatgatggctaacattttactggtacagtccactccccatcatttcctttcgccttctctttgttctaaggactcaaaagggactcaaaagaatctcttactattttgggaaggagcacaaatacacacacacacacacacacacacacacacacacaccaaggttataagctagtttgagttgaagaaagaaattaagaagacactaggaagacttctcatgctcgtagactgtcagaattaatattgtgacaataggccacactaccaagagctatctttggatttaatgcaacccctctcgaaactctgaggacaatagtcacacgatagaaggacaatcctaagtttatatggaagcacaaagatcctggtttgccaaagcattcatgaggaaaaagagcaacgctgctggtcagttaaactagagagcgtggtaaccaacccatgtgactccatcacctaaccttgtcaaatatataatgtaagttaaaacatcaattgagggctggagagatggctcaatggttaagagcacggactgctcttccagagatcctgagtttaattcccagccaccacatggtggctcacagctatctgtaatgggatccgatgccttcttctggcgtgtctgaagacagctacagtgtactcacataaatgaaataaataaatctaaaaaaaaaaaaaagaccatctattgaggggagacggtgtctttaccagacagtgctaaaaacccctgggtgcccacgtgtaaagggatgagactacacccatctttttcatcaaagcaattcaaaatgaattaagaacctcaatgcaagaattgaaattctgaaagagagaaagggaaggacagacagaacactttaagataccgacataggcaggggtggaaagagactctaacagctcaggaaatcatttcaagaactaacaactggactgcctgaaactcaggagcgcttgttcagcacaggaagccatgagcagagtgaagacagctcatgggacaagaggaaacttttttttttttgccagctatgtatctgacaatggattactatctagagtagatgaaaaacccagaaattaaaacacctcccaccaaactccaaccaataaacaagcaaatgaaatggaagttacttctcaaaagaccaagtacaaatgatcaatagatgcggtaaaaaacaaaacaaaacaacaacctcttgtactggctagttttgtgtcaacttgacacagctggagttatcacagagaaaggagcttcagttggggaagtgcctctatgagatccaactgtaaggcattttctcaattagtgatcaagggggaaaggccccttgtgggtgggaccatctctaggctggtagtcttgggttctataagacagcaagctgagcaagccaggggaagtaagccagtaaacaacatccctccgtggcttctgcatcagctcctgctttctgacctgcttgagttccagtcctgacttccttggtgatgaacagcagtatggaagtgtaagccaaataaacccttgcctccccaacttgcttcttggtcatgatgtttgtgcaggaatagaaaccccgactaagccacctcttatcagggagattcattaaaactacacagctgtcagaaatgcaaactattgcagccatcacggaaatcagcatggatgttcctcaacacaaacaaacaaacacacacacacaaacaacataaaaagccactaccctatgatcccactctaccactcctgggaatgtactcaaaggaagcttatgtcaacacaccacagaggtacttgctcatgtatgtttattgtggctctattcacaacagccaagctgtgtgtagtcagcctaggtgttcagcaacagatgaacgggaaaagaaaatcacacatgctcacatgcacacgcacgcacacacagagtctcattcagctataaaaatgagtgaaattgtgtcactttcaggaaaatgaatggaatcgattagaaaccattatgtggaaaaaaccagaaccagaaaaacaaatacctcaccctttctctcgtgtatagaaactatgctgtatgtatgcattatcaacacacacacacacacacacacacacacacacacacacacacacacacacacacacacatggtatggaaatgggaagggaactatttgggagaggagggggattagtgggagagggcaggagggaccatcgggaccatggtcagagcacacaatgcaactggacagacgctcacgatgaactccatcacttggcacgacaaatgcacactaataataataaaaaaaacagttttgcctactgttttgcatatgagcttcaaaaccatgtgatatattttctaaattgtcccctagggatttgggaagggacatgaggagtagcaattattttcagtcccctcctaggtagacacaggggagactcactgagaggttcgtgaaggctccttgggcaggaggaccagagaaacaagccttgtgcctgactcagattgtgtccctgtgggggtggcttttcttccatgtcctgtgaagaccagctgcaggtcctttaccttggttatgatggtgttgaggaagatgtctgaatctccttccgggtcttttttctcgtccatcagggggatgtcatcgtttggtggaatcacaaacacaaagtgctttaggatctccgtggcgaccaaagactgccgctttgctgggtaagagatgatggagaacaagacgggaggagggatgggtggtcctgaggaccccaggcctaggatgtccaggatctaaatggaaaggctttgcattagtttcctgtgcagattgtgcaccaactgtacacccctgtcagaatgaacccggggtgcgtgtgtgtgtgcccatgcaatcttccctgccctcctctgacttggctctgccagacctgtcacatggtcctggaggctctttgctgtggcatgtgtatgctctgtatttctcatagccagcgtcacccttttttgtgaccatttgtctgcctttgcaaatggggctataaactccattcagacaggaaccaggttgatacaggagatggcctttgccatccacaagactgtttaatttaaacaggccaactcctaagtttcagatgtctgtagcatagatctacttcatccattctcatagttcgtgtttttttttttttttttctttaaatgttctttctatccaaaaacaagcaaacgctgggactggggcaggttatatacggcgaagagggaaaacctagaaaacaaaggtcagtttctggggctttctctccctgtactctggtactctggtatagacgcatgactataatacacgagtcatcttcagagcaagggcctgcagattgggcagcaggttctttctcagcatacaggagttcagtgtctagactgtcacccacaccggagatgcccatagcctgacggtggactcagtggcctggtaggcctaccagggcaagacctccacgtacctatgtatcccatcccgtgaccaccgagcatcctgacatggaactggagttgcttcctagggtttacagtgtccacggagaaagctgtaattattaaattaacaaccaattttcattaccaccagttattaaactaatagtctacttgagagagtcagaaggtggagggtacaaagctgcacaagagatggctctggataaggagggaaggatttcttgagtccccactcccccagttctttacctaagcctggtctgaaacaaagcttgtgagctgcactatgtagatagagggagggtgtggtgtgttcgtcggctccgccctccgacctactgtgggtgaggctgtgaggacactcattaggaccacttttaccctcctcctgccatgcctccctctagggatctcgtcagttctaactggtctgtctaatttctgattgagccagaggtcagcagactgtggccctgcctgctctttgacaaatttggcccgctgtttgcttttgtgaataaaagttattgaaacatggccaaggccattgtatcttgttagtggttgttgaaaaactgtgtgacctttagactagaattttactttctaatgctttacagaaaaagtatatataaaaaatatgcactgtgtataaaacacatatatgcatattatatatgtacgtacttatctatctatctatctatctatctatctatctatctatctattataaaaatcttccttcccctaaaccaccagttgaggttactttataaggcacacagcttttgttggtggcagtaaaaggctgcctaccgaacagattaattcccatcccaatggaaagttttcataggaagaaatcttggaatagagaagccttttgattgactccaaagcatgtctctcatttccccggggaactagtgttgtcaatattaaagaccagatgcaaagatggcttttaatgaggccaaagagatggaatagactggtggaactgtctatggattagctattgttgccctgtacccaaggaggtatcagagatgagtcaaagggcttgtggattcttcgatacggagctgtattcatggtagcgtggtccctaggtctcacttcttgctttaccccacagaagcctttgtacctggtctcctttgggaagcttgtcactctccagagcttgcttccagcttacaccttcgaagtctggagactggatgttgataaagggcaccccgagatccttctttccttcatgctcctcttccccttccccttccacgtcgctccgctcctccagggccttcagcttctccagccgctccctctcagccttctccctttccagccgctccttctcagccctctctttctccaagcgctccctctcccggtccttgcggcccttgcgacccccgccccctgaaggcgcctggcgctggtcgtcagcctcatgtgacatctcgtccgtgcctgtatgaggtaccatcatcccttgcttgcggtcccaatacatgaggatgttttgaacatccttcagacacatgtcgtagattttaaacttttgtgccaggttcttgtcagagtccttcaggaagtctccttcgctgtcctcttgttcttgggaaattggaattaagagtgggtattcggtcatggctttcttcttcctggtggtttcttcaagtgttgcgtgctctctgacagaaactttcctttctattgattccatctttaattctatcttggcaactgcagcaagctaaaaagcaaaatgaataaataacatgtcaaacagcttattgaagacaagcaaaaccgtatgcaggacgagaaacatcttgtttcaccaggaggcctaggattcaggagcctccttcggtgcagtcagtttgtggaattactttgtatgtaatgtggggagcttcagtgaaatgtctgcctcatggttttacattgtagattgtagccttgtgaattttgagatagatgcccagccactttaacccatgcttctgcgccagggctgctggtctcaaggaccaatatggaaaggccagcaaaccgcagtcttctgcgcctgttttccgatgtcctgggagagggcagagagaggggctcaagcccagcagtattgcagctttgggaccctgctgacaacttagccctttctctgtatagtggggtttagtagagctagagagatggctcagaggttaggggcactgactgttcttccagaggtcatttcccagcaactactatggtggctcacagcggggagagttaataggcacatccaaggattgttaatgactaaagtatgcaccctgatataaggcatttgcaacagtgcctctcctggagcggggatctctggaggtttcggagctcannnnnnnnnnnnnnnggtgcgatggggaaacgggtctgtagttcagtaggacaaagctttccaggaatgcacaaggcttggggtggaaaccccagagcttctaattgttttcctccttaaagaaattccaggccagggctgggtagagataaagcagaagcactttgtcactcttgagaataggcagggaaggagcatgcctgcaagcttctgtcttgtctactctgttctctcttgcaggctcgtcctttccctcacatctttcactcttgggaagtaggccatgttggaaaaggctctaagaagaggtccacatgatgactaattgaggccctagccaactgcccacagggagctaaaagccttcccagaaaccacaagtcccagtctggaagcagattatctagtgtctggtgtggggagactagatatttggatgactgcctgactctagcctcctgagagacccctgagcaaagaccacccagccaggctgccaccgtgcagggagcaaacgcttgctgcctgacaagatgctaaattggagagtaatttgttatggatcaccagacaacagataagtgattcttaggatgatctgtaggttcgatggaattccattaaaaaatccctgagttcttttctttgcctttatttttttctgagcaacttggcctcaagatttgcatagaaataaagagtcaagaatagctgacataatcctgaatagtaataagagtataagccatcacgagagttaacgagagttaactcagtggctgcagctttacttgctgtcaacaagcccttctctaagctgatgtgcataagacacatcaattccctattcccagagatgggagatcaagtaggctcagaataacaagagcaagctaacgtctataatgaaacagagagtaaaggcaacttcagactcaaacgttgggagagccaaatgacatgaacctggtgtcattctagctcctgcttggttgggatcatcaacactgagagccagagaacccagctcaccccttaactgaggggatccacgtgacctggaaaccttggtgggataatctgacaaaggcaggggaagctggaggactggtttgtttgactctgaggtgcagtcatagaattagcctagtgggggcagtagagaacatttgattactcaaaaactgagaggctaggacaaaaataggaagatcatgagtttgaggccatcctgggtgacccagggagacacttgcctcagagaagccaacccaaacccaacttaaagcaaaacaccatggacaagaactgaccaatggctggatcctacttctgaaacagcccagctggagagaaatctctgagtagagcttactggatcacaccaaagacacaggagacaaaggacagattaaaccccactgacaatgggcaggtgtgcaaaggaaactaagttaaatcctggaggcaaaggaagaggctggagtagtgaaggggacaaggcagagccggacaagagctgaggagggacgttagagcagggatttcaataacatttagacagtgaattttggaatgataaactgataggaaagtccattttctcccggctcatgttctcctaaccacagtcagaggttttgtgtgcctctccagaacattctgtgaataagcaagtacagcaacaagtatagaagcatgcatatgtatgtgtgcatataaatatgtttgtgctacatgtatatatgagtgggcatatatatgtgtgtgtatatgtgtatgtatatgtatttatgtgtgtgtgcatgtatgcacatataaagatgtgtatggtgcatgtgtgtatgcatgggcacatgtatatatgtgtgcatatgtgtatgtatatgtatttatgtgtgtgtacatgtgtgcacatataaagatgtgtgtggtgcatgtgtatatgcatgggcatgtgtatatatgtatgtgtgtgtacatttgcatgcatgcatataaatatgtgtatatggtacatgtgtataaagtatgtatatgtatgtgtatgttaatgtatgtatatgtatgcgtgtttatatgtgtgtgtgtattttatcctgatacttttcacaccttgtttttctttgcacactaagatccatgctcctttgtatgtgtgtgtgtgtgaactggggatcgaactcaggatactctgtgcatgctgggcaagtgcccagccactaaggtccacttctagctctgtgctacttttataattagcaaaaaagatgttttccctttggtttgaacaaggtgaacaatcaatagacagagtcattttatacaagtccattgtacctgtccacaccaaagccacatgtccctagttcacatgaagactttggctacagaagaaaggaacacaaggctgcctgtcccttgccattcttcttgctttctaccagggctggcccacacttaagctaggcagaacacagatccagaggctccatgggtagaagcctctgtcatagcccttaagggtcccctggcagccagggcctacctcagagtttggaggcacagcgaactgggaaggcaggctaatgtcactcaacttgcattctgttgaaaaggtcactgagtagggcagggggttctccaacttgatggaggctgatacactctggcggactgggcttgtcatctggatggtttttataatgccagaaggggtgaccctgaactcacagtatagtataagaactcgttggtcacctcgttccggaagacacctgcgttcacagggtgagtgggaagaagcagggggagagcanangttaatctagggtctntgtcataccaggcttccctgttgctggaagccttgnkgggcacatgatgtaaggwagggtgtggaatgacctgccagtttgatccntgccaggcattcttttctctttagggtctgtagtctggcttttttttttttttcttttcctcgagacagggtttctctggtgttggcctggctgtcctgggaactcactctgtagaccagcctggccccgaaytcagaaatctgcctgcctctgcctcccaagtgctgggattaaaggcatgcaccaccacgcccggctttagaagaccctttggagccagcttggccccattgtaagcatttttgccagtagggccagcaaggcaaccccaaaagaaccaagcaagacctcagcccttcaagttggggtgggcttcacgcctattgctgttgcgcccagagctgtcagtgagaatgacgtcactgacagacagcatctggtgcttgctgggggattagtgcttgcccagctacacacgatcccacaatgcatctgcaacgccattgccccttatagacgtgggaatggaagcgtagcaaagcttagtgtctcggccaaggtcacgtgtccaaagaagtatcctgcatggagagatgtccgggctcacctgtgactgctctacgcagccctctccccctatggctgactctggtcatctgccaagattccttttccctggagagaggggaagctgggcctgtgtgcttgttggccattcataaatagaaacttcaaacacatttcttttgagatggggtctcatatagctcaggttagtacccaactccagaggcagaccccaaatgcctactcctcctgcctctacctcctaagtgctgggatttcaggtatgtgacaccatgcctggattttatgctgttgattttgtaaagaagagtctactcaagcttttgctctttttaacacattgaatcatcaatcttattattactaggtggcaattttatttatacagcctggcttttacattctctctctctctctctttctttctctctctctctcttttaaaaagatttatttattattatacataagtacactgtagctgacttcagatgcaccagaagagggcgtcagatctcattatgggtggttgtgagccaccatgtggttgctggaatttgaactcaggacctttgggggagcagtcagtgctcttacccactgagccatttcaccagcccccttacatacactcttttaaaggctttaagtgtatactttaaaatctttcactttgtgattccatcactaataatagttttaaaaactacgtataaacaaacaaacaaacaaacaaacaaacaaacactcaagcctccaggcctgactcctgtgatctatgaatctatatacacttccctgcttcaaagcacttctctgattagaaagttacacattgatagaatgaagcctgtctcctccactagactgtgcttcttgaaaacagagcttggctttggccattgctgtattgctagcacatagcactgaacatggctatgtgctcaatggatacctaaataaatgactggattaggcaacatagaacatagtgaaccctatggggcacaggcaccatgcctggaggacagcatctgctgttctctaacatcccaggaccaaacttccgtgttttggggaggcgccttggacgtggcaatacctttgcagtgtacagtccctccttgtaggaaaagaagttcagcttgkagyctttcttggagccagacagaacatcaatgtaatcaanggccyttcagggtgamacttaaggtctgkcttctctggkttmaatatttccacaatgacccggaatctggagcagtacaggagagaagagaggcaatgagaaacaagagacactgagagacagcgaaactgtcgaaagatgggagggaaaggggctgtgtctacttttcctttcatgangattgtgtgggtctgtggttccagtctttgatctgtcactaagaatgacagcaactgccatttatcgagcccggtnnccggtacccagcagcccctctctctgttatttacagatattcagctgacacaatgtccagaggaggtttgcttcatcaacacctctgctttatgggagaggaaagagaggctcaaagaaggaagataacgcactcggacgacatgcgtagctyctggcaaaaccagggtgcagacttaggtctgagctctgtctactatgccaagcaggtggcctcgagggagacgcacttctagtcacctctctttggaaggaaaggatgaggctacttgcccgtgatctctttcagtccctgtattcctttctatctcctactgtcagcacactttgagggaccctcttctctggctagtagttcgggctataagacactcaacaacaacaaaggtgttggctgttaggaccatcagaactattatggggcatgtattttgtgtgaggcagtgctctaggatctgtaagatgtaggatctgtaagaatcaacattgagcaagaaggcaaggcctgcgtgttcatgagacactggctttattgaggactgtgtttctgactccccctaaatctgacattctctgtaggtgaaggaccaagctggatggtggaagtcatctgctccctcaccccctcactgctcaccccacactctcacctytggggcttgttcagccagttgctgattggcaggagctcggtatagggagtcttacatggaacctcacggtagatattggcaacagctttggggagttcggcagtcccgtgcagggcatatagccagccagtcccatcggggagtgggaaaaagagagtgcccttggaagaagaagtgacaaataagaatgacatagtagaccctttattaatagacatctgcctggcctagagaagaaaagtaagcctaacacttctactttaccttttggtttgtgtgtgtgtgtgttgcatatgtagatgagtgcacctgtgtataaccatgggagtccagaggacgacactgtcttcctagattgtttcccatgttattcctttaagacagcgtctctcacagaaaccgaagcttgctgtattggacacatagtgaagactgaagagaataccatttgctgctcagagcaaagactggcttctttccttttctgaattttaaaattagattttgaaaagattcatttttatttttgtgtctgtgtgtggatgtatacataggtgtgtagggcctatagaggccagagagggagggcattggatccccggtgaaactggaattacagatggctatgagcctctcagcataggtattgggagctgaactcaggtcttctgtaagaatagcaagtactcttaactgttgagctatctttccagctcttaaattacattttcattcatttgttcgttcattcattatatgcacacatatgacattgcatatatggaaatcagagaacaacttatgagagtcataagttctctccttataacatgktggtcttgaggaatgacccttggtggtaaggcttggtggtggacacatttatgggctgagccatctccctgactctcttctgatttttattacagttgccattatgccactgatgcacgtaacctgaataggaactgctcggggttaagcccangggcttcctttnatagccgngccccaggattttaanaaaaatgtcgccaagggggcaagcttctgcctgccacttgtta

SEQ ID NO: 9 - DNA, 21 bp, Artificial sequence
  Synthetic primer
caaaagagctgaggaaagatg

SEQ ID NO: 10 - DNA, 19 bp, Artificial sequence
  Synthetic primer
taggatgcagggggttatt

SEQ ID NO: 11 - DNA, 25 bp, Artificial sequence
  Synthetic primer
ggtccgagaaacctgcctgctatca

SEQ ID NO: 12 - DNA, 25 bp, Artificial sequence
  Synthetic primer
acccacgtcgcctgtgttcattatg

SEQ ID NO: 13 - DNA, 15728 bp, Homo sapiens
agctcgggcggcgcatggagagtgcgggcggcttcaagctgggtatggagcccctcagcggcggcggggtctgtgagttggacgcggggtcttggcggggaatggaggtagaataaacgtgggacccggagtgcaccaaggtgagaaaaaaaaattactaaaaatgacaagtagaagacttgaggagtccatgggggctgttcagatgggattggtcaatatgttcaaaggatttcaaagcaaggttttgccacccctgagtccaaaggtggttacagaagaagaagtaaaccgaatgcttacaccctcagagttcctgaaggaaatgtccctgaccaccgagcagagactggcaaaaacacgtttgatgtgccgaccacagatcatcgaactcttagatatgggggaaacaacacatcagaagttttcaggaattgacctggatcaggcattattccagccctttccatcagaaattatatttcagaactacactccctgtgaagtctatgaagttccactgattttgaggaacaatgacaaaattccaaggttggtgaaagttgtggaagaaagttcgccttactttaaagtaatcagccccaaagatattggccacaaagtggctcctggagtgccttccatattccgaatcctctttactccagaggagaacaaggattacgcccatacgttgacctgtgttactgaaagagaaaagtttattgtacccatcaaagctagaggggcacgagccattctcgattttcctgacaagctgaatttttccacttgtcctgtcaaatacagcacccagaagattctgctggtacgaaacattggcaacaaaaatgctgtatttcacatcaaaacttgtaggcctttctctatagaaccagctattggaactcttaatgtgggagagtccatgcaactggaagtggagtttgagccacagagtgtgggcgatcacagtggaagacttatcgtgtgttatgacacaggtgaaaaggtgtttgtatctctctatggagctgccatagacatgaatataaggctggataagaattccttgaccatcgagaaaacctacatatctctggccaatcagcgaactataaccattcacaatcgcagtaatatcattgcccatttcctgtggaaggtatttgctacccagcaagaagaggacagagaaaaatatagggcctgtgatgatctgatcaaagaggagaaggatgagactgatgagttttttgaagagtgcattactgatcctttactccgagaacatctttctgttctgtcccgaacctttgcgaatcaaaggaggctggtgcagggagacagcaaactgttcttcaataacgttttcactgtggagcccctggaaggtgactctccaagcaatggagtgcaagcagcatttccctatgaccacagactccccctccacagagcatccactggggtccatgttctgtggaacggccgagaaatccgtctgcccctccgaatcaaaggggaaggcatgggacctaagattcacttcaactttgaattgctggatattgggaaagttttcactggatctgcacattgttatgaggcgatactgtacaacaaagacagcatcgatgctctcttcaacatgacccctccaacttcagctttgggggcctgctttgttttcagtcccaaggaaggcatcattgaaccaagtggagtccaagctatccagatctccttcagctctaccatcctgggaaactttgaagaagagttcctggtcaatgtcaatgggtcacctgagcctgtgaaactgaccattagaggctgtgtcattggacctaccttccattttaatgttccagctctgcactttggtgatgtttcctttgggtttcctcataccttgatatgttccctcaataatacctctttgatccccatgacttacaaactgcgtatccctggggatggccttggccataaaagcatttcatattgtgagcagcatgtggactacaaaagaccgtcttggaccaaggaagaaatatcctcaatgaaaccaaaagaattcaccatctctcctgactgtggcaccattcgcccccagggatttgctgctatcagggtgacattatgctccaacactgtacagaaatacgagctggcactcgtggtggacgtggagggcatcggagaagaggtgctggcgctcttaattgcagcaaggtgtgttgtacctgccctccacctggtcaatacagaggtggactttgggcactgcttcctgaagtacccgtatgagaaaacactccagcttgccgatcaagatgacctcccaggattctatgaggtccagcctcaggtgtgtgaggaggtgcctactgtgctgttttccagccccacccccagcggggtcatctccccaagcagcaccatccacataccactggtcctggagacccaggtcactggagaacacagatccacggtttacatctcaatctttgggagccaggacccccctttggtatgtcacttaaagagcgctggagaaggcccagttatctacgtccatcccaatcaagtggacttcgggaatatctacgtcctaaaagactcttccaggattctcaacctatgcaaccagtccttcattcccgcatttttccaggcacacatggcacacaaaaaatccctttggacgattgaacccaatgaaggcatggttcctccagaaactgatgttcaactggcactgaccgccaacctgaatgacacactgacattcaaggactgtgttattttggacattgaaaatagcagtacctatcggattcctgttcaggcttccggaactggttccactattgtttcagataagccctttgctccagaactcaatttgggggcacattttagcctggatacccactattaccactttaagttgatcaacaagggacgtcggatccaacagttgttctggatgaatgatagcttccgaccccaggccaagctgagtaagaagggccgggttaagaagggacatgctcatgtccaaccccagcccagtggctctcaggagcccagggatccacagagccccgtgtttcatctccaccccgccagcatggagctgtacccaggccaggcaattgatgtgatactcgaaggctattctgctactcccaggatagtgaaagagaagctggtgtgccacgccatcatcggggcacagaaggggaagagcttggtgatggctgtgaacatcacctgtgagttcgtcgcacctctcatccagctctccaccaagcagctcatctaccgactggagaagaaacctaacagtatcctgaaacctgattaccagcccttggccgtaaagaacatttccaccctgcccgtgaacttgttgctgtcaacatctggacccttctttatatgtgagactgataaatccctgctgccggcaactcctgagcctattaaactggaaattgatgaagaaaaaaacctgctgatcaagtttgacccttcctacagaaacgatctgaacaactgggtggcagaagaaattctagcaattaagtatgtggaacaccctcagatagacagcctggacctgcgcggagaagtgcattaccccaacctcagctttgagacaaaggagctggattttggctgcatcctgaacgatactgagctcattcgctacgttaccatcaccaactgcagtccgttggttgtgaagtttcgctggttcttcttggtgaatgatgaggaaaatcagataaggtttgtgacattgccaaagaagccctacagtgccccactgtcccagatggagtccatcccagcaacctcagaggctgccagcccaccagcaatcctagttacagtagagtcccccgagatggatttaaatgattttgttaagactgtccttgtggatgaagatgccaggcctgaagaaaaagaactaagaaaaacaaaagcttccagtgtgatctcagatgaaataaaaattagctctactgaaatagaaagaatatactcaagccagagccaggtggaggatcaggaatccctacagacctgtgaacagaatgagatgctttccattgggatagaagaagtgtttgatattttgcccctgtttggagtgttgcagccacacagtagccaccaaatatcgttcaccttctatggacacgctaacatcattgcacaagctaaagctctgtgtgaagtggaagaaggacccacctacgaaataacactgaagggagaggcgtccctggtcaactattcctttgacaccaaggatattcactacggattacagctgtttgaccatgtcacagagagggaaatcacgctgacgaacatggggaaagttggctttgagttcaaggttctgactgaccaccagtcttctccagacaaccttctccctggagtgccactaatcctgcctgtgtctggctttatcagttcacatcaagagcaggtattaaaagtttactacctacctggagtacctgaggtctttaaaaggagtttccagatacagatcgcccacctggacccagaaaatatcactctgagcggagagggaatctttccccaaatctgcctcgatctccccaggaacctcacagcaaatgaaaagtatgaaatgttcttgaatcaagccaggaaaaacacagacaaagagtataacaaatgtgaaatgctcgatcactttgacgtaataactgaggaagtgccagaagacgagcctgctgaggtaagtgctcatctccagatggaggtagaaagacttatagtccaaagctatgtcctagaacatcagaaaacaaccacccctgatcctatggatgacccctgcttcagccatcggagtcgccgcaaactggccaaaatccagctaccagagtacatcctggactttggctacatcatccttggcgaagtccgaacccacatcatcaagatcatcaacaccagtcactttccagtgtcattccatgcagacaagcgtgtccttcatgagacaggattcagtactgagctagatcgtgtaaagaatctgcctcattgtgaaacggaaatatttgaagtgagatttgacccacagggggccaatcttcctgttggaagcaaagaagtcattctgcccatcaaggtggttggagggccaacagttcacatctgtctccaagccaaggtgaccattccaaccatgactctctctcgtggaaaagtggactttgccacaattcagtgtggacagtgcctggtggaaactattcagctttccaatcatctccaagtcccttgtgaatggttcgtccagagccaaaagcctgttgacaagctggagaaacacatgccgaagtacttaagacagaaactacgcgctgaattaaagccaaagacacggatcttcgaaatccagcccatttctggagtcttggatcctggtgagaagtccaacgtgcaagtgaaattcatgccaaaagaagagaaattctacagccaaaccctggtgtttcagattgcccagagtgctcaaaagcttaccctcctggcacgtgggcaaggtctagagccacgcctggaatttagtccttcagtcctggatctggggccactgctactttgtgcacctggagacgaggccgaggtgatagtgaagaatccctgcaacttccccattgagttttattccttagaatttgatcagcagtatctcatagaagaaaagatcttgcggaagctgaagggctatgattcctacaacaccctgctgctgcctccccacaaccctggggagaagctgcccccagaactgtacgagtacttcaaagagataaagaagtcaaaagaggagcagatgagggcgaaatatctggagaatctggcacaggagaatgaagaggaagatataacctcatcagatcagggaacctccaatagcacaaagaggacatcgctgagccgagggatctctgtcacatccaacctggaagaatggcacgccctgttggtcgagtccaaaacctacctagaggaagaggaggatgaggaaagcctggaaaaaatcattttccaaactgacaagcttcagagcattgacagccactccatggaggaagttggagaggtggaaaacaacccagtgagcaaagcaatcgctcgccacctgggcattgacatttctgcagaaggccgcctggccaagaaccggaaaggcatcgccattatcattcacgggacacccttgtcaggaaagtcagccaatgccgttagcgtggccaagtactacaacgcagcctgcctgagcatcgactccattgtgctggaagctgtggccaacagcaacaacatcccagggatccgggcctgtgagctctgcatcagggctgccatagagcagtccatgaaggaaggagaggaggctgcccaggaggcagctgtgggtcaaaacgtcatagggcaaggacgactgagcactgacactttgggcaagttagcctccgagatgactctggtggccccagaaattaaacctggaaagagtgttcgtgggagcgtggtgatcaccaaaagcaaggcagacagccatggctccgggtcacagaagcagcatcactcacaccagtctgaaacaccacagatttcctccagccctctccccccggggcccatccaccgctggctcagtgttagtcccagtgtcggaggcgagaccgggctgatgagctgtgtgctcccggatgaacttctcgtgcagatcctggcagagcggatacagctgagtgactgctaccgaggagtggtgtttgatggcctcgacactctctttgctcggaatgctgcagccgccctcctctgcctgctgaaggccattggcagccgggagcatatatacattctcaacatggcccaggattacgcagccatgaaggcccgggagaaagccaaaaaggagcaagaagaacgcaagcacaagggagctcttgagaaagagaaggagcgtctccaaaacatggatgaggaagaatatgatgccctgactgaggaggagaaactcacattcgatcgggggattcagcaggcgctccgcgagcggaagaagagggagcaggagaggctggcaaaggaaatgcaagaaaagaagctacagcaggagctggagcgacaaaaggaagaggatgagctgaaacggagggtcaaaaaaggaaagcagggacccattaaggaggagccccccatgaagaaatctcaagcagcaaacaagcaggttcctccgctcaccaaagtggatgtcaagatggagacaatcgaaaggaaaatatctgttagggaacaaacaatgtctgagaaggaagagctaaataagaagaaaaggaacatgggcgatgtcagcatgcatgggcttcctcttgtccaggaccaagaggacagtgaaggggacaactcaaaggaccccgacaagcaactggccccgaagtttaagacctatgaattgacactgaaggatgtccagaacatcctcatgtactgggaccggaagcaaggagtccagctgcctcctgcagggatggaggaagcgccccatgagcccgacgaccagcgccaggtccccttgggtgggcgcaggggccgcaaggaccgggagagagagcgcctggagaaggagcgcacggagaaggagcgcctggagagggagaaggcggagcgggagcgcctggagaagctgcgagccctggaggagcggagcgactgggagggggaaggggaggaggaccacgaagggaagaaggagaaggacctgggcgtacccttcctagacatccagacaccagactttgaaggcttgagctggaagcaggccctagagagcgacaagcttcccaaaggagagcagatcctagacatcttgggtctgggtgcctccggaccacccatcccgcctcccgccttattctcaatcgtctcctacccggtgaagcggccacctttgaccatgacagacgacctggagcattttgtatttgtgatcccaccatccgaagatatatctctggatgaaaaaaaagaaatggaaatagaatcagactttttggccaccacaaacactacaaaggctcaagaggagcagaccagctcatctaaggggggcaaacagaaaatgaaagaaaagatagaccaagtcttcgagattcagaaagacaagcgtcacatggccttaaacaggaaggtcctttctggggaacctgctggaaccatttcccagctgtcagatacagacctggacaacttcaacgggcagcactcccaggagaaattcaccagactgaatcacttccggtggatcgtgccagccaatggcgaggtaacgttgcaggtgcacttctcttctgatgagttcgggaactttgaccaaacctttaactttgagatcctaggaacttgctgccagtaccagctctactgccgaggcatctgcacttacccatacatttgccaagacccaaaagtggtatttcctcagcggaagatggacatgaagacaaatgaggtcatctttaagaagtatgttatgagcacggagacgtactactttgggccactactttgtggaaaatcaagagataagtacaagtcatccttattcccaggcaacatggagacgctaacaatcctgaacacttccttaatggtggtggaggcatccttctattttcagaatgatgtcaaagcaaacacgtacttcctggaacccaacaccatggtcctgaaacccaatgagaagcagatattaaacgtatgggcctaccctacttcagttggtgtctttgaagacagcattgtctgctgcatcaatgacaacccagagccagccatcttccaattaagctgccaggggatccgcccggaactagagctggaacccaggcaattacattttgaccggctcttgctgcacagacaggaatccagggtagttcttctccgcaatgtcacgctcctgcctgtggcctggcggatcaccagcctggagcacttgggtgatgatttcactgtatccctgatgcaggggaccatcccccctgaggctgagtacggcctgcacctgtactttcagcccaccaagcctgtcaacatcaagaaggctattcggttggaggttttagatgcagaaaatcttcttggtgttgttcagattgaaaatatcatggtctttgcagaggcatacgacatcgccttggacatcaccttccccaaaggagctgaagggggactggattttgggattgtcagggtcacagaggaggcgaagcagcccctgcaattgaagaaccgtgggaaatatgagatcgcgttcagcttttccgtggactctgtagggatttcaacacctaatataaattccatgatctcagtccaacccaaaaagggttcactgaccccaacagaaaaacccacaaatgtccaagttttcttccatgcaaaaaaggaagtgaagattgagcaccagcctgttctgcgctgtcagattattgagcccaatatttcagaaggaggtgagatcattgccagcatcccaattaagttttccgcgaatgcagtatattccaaatacaacatcaccccctcctctgtcatcaactttggagctttgatctgtggcactcgtaaaagcaccaccttcaccatagaaaatcaaggtgttactgacttcaagttcgccctttataagctgacaggggagagccccattcatcaaaagaaagcagccagccacgtcagacatgcaagatcccgagaaagtgagagcttctacaaaactggctcttccagagcagccaagttctctgacacgattcagaaagaagtaaccaccacaggccaggcccgcttcgcccatggcatgttcaccgtgtaccctgggtttggctccattccttccggaggacagcaggtcatcaacgttgactgtgtggctgacgccatgggaaagtgtgaggagtttatagccatcgatatctccggccgagaccctgcagtccaccctgccggcattctttacactttgctagctgaagcctgtctaccagccttcgtgaccgaaaacaatgccttgatatttgaagagcaccagatatgtaccagtgccaacctgcaccacatcctgcagaccatagagagcggggggctgttcgtcgaggatgagaacaagttcatcttctgcaatgtcctggtgggccgccaagccaaggctcgtttcaagatcagcaacgtgggaaagatcacctgtgatgtcaacattgtagtcaggcctatctccaataagccctttgcccgcatcgtcgacatttttgaagtggaacccagcaagatgtgcattgccagtcattcccatgcctttgccacggtgtccttcaccccgcagatcatgcagaactaccagtgcatctttgaggctaccttggatggcttgcccagcaccctggccaagagccgaggcctcgtgtttgacatcgctggtgaggggaacctccctcgagtgacggttgtgcggccagttcttcataaccaatatggaaaccccttgctcctctttaagaggcttctccttggtcattcagagaagctgcctctcatcctcaagaacaatggtgtcctccctgcccagctgcatgttgacctgcaggatgagctaggagtcttctccctgaaagggaggcccaccaccgcgtatatctacatcacagaggaaaataaaccacatgtaaaagcaaagaaagctcacacagcctccttggttgtttctcctggagatacagctgaatttgatgtcgttttccactcccagaaggttgggaggatgagaggtatcatccacttgtcagtgatcaacaaccaatatgaggagacctccatccacatggtgggagagggctatgaggatgacatcaccttggacaacatccatggactggtggcccccaccagccaggaagacataagtatctctgagttcacagagatcatcgaggacaatgatatggaagacttggtggcagctgctctggtggaccacatccaatttggggactgccacattggacacagctataatgcgagcttcacagtcacaaatcacagccaagtgaacttgatacggtttgaatggcctgtttcagctacaattgctttctccccacagatgggccacctccaccctgggtgtgccaaggacatagtggtgaccatgaagtcagatgtacccatcaacctaaagaatatgcggatcaggtgcaagctctccaggattatgtttcagctccctgcagaccaggtccccgactgggatgaccgcatgcacacagtcaagtgggtggacgtacccagaaacatgcctgggactttcactacaaaacgaaaagtgatagagacggatccggaacctgctcactcagtactagaagaaaactaccaagaactgcagcttcaaatcagtgccaatgtggatttcgcttcataccattgccaagcaagagatgtgcgctttaaggaaaccttggtttaccagacccgagtgtttgagttcgatgtgattaattcaggacgtgtccagctggaattcagctgggtctcagaagatacctcaaaggcagtcagctttgcaaaaccagatcaccaaggttcagctcaaaaagatcagcttagtcagggcacgatgcatacaggcagcaccctggacagcaccatggaccactgggccgagggttccccacagcccttctctgtggagccctcttcgggaatcgtgccggtggggaagattcagaagttcaaagtaaaattctccccgttggacattggagacttcgagagcaaccttttctgccagattcccaacctgccacctggagagcaaggtccggtcctggtagcaaaagggcggagcaccttgcccatctgccattttgatctgaaagactcggactacataagtggccatcagcgcaacccagagctccgagggtccagtgggggagctctggatccaaacacccgggtgattgagttcaccactgtgggcataggagggaagaatctccggacctttaccatcctaaacccaaccaatagcacctactccttctgctggatctctgaaatcgtgttccagttcacacctttccatctgggcatcactgagtcatcatggaccttcctaattcccgagcacaacatcacaatcgtgttccagttcacacctttccatctgggcatcactgagtcatcatggaccttcctaattcccgagcacaacatcacagtccctttcctgctggtaggcaaaactaccgaacctctcatctctctgaacaagtcacacctcaacttcagctctctcctcattggcagagaagccagggagactgtgcagatcattaacaaggaggagcaggggttcgatttttccttccaggacaactcccgctattctgaaggtttcagcaacagcctgcttgtatgtcccatggaaggctggatcccaccactgtccaggttcccaattgatattttcttcacaccaaagcaggaaggagatgtgaactttaatttgatctgcaatgtggaaaagaaagtccaccctgtgacattaaatgtcaaggccgagggctacactatgaatgtggagatcaagtgcaaggacaggacaggctccatcactctgttgactcccaaccagactaacatcatcaacttctatgaggtggagttaaatgaatgtgtccagtgtgaattcaactttatcaacactggaaagttcaccttcagcttccaggcacagctgtgtggctccaaaaccttgctgcagtacttggaattttcacccatcgacagcactgtggatgtaggacagagtgtacatgccaccctgtcttttcaaccattaaagaagtgtgtcttgacagacctggaactcataatcaagatcagccatggtccaacatttatgtgcaacatctcaggctgtgctgtgagcccggctatccatttctccttcaccagctacaactttgggacctgctttatctatcaagctgggatgcccccatacaaacaaaccctggtaattaccaacaaggaagaaacacctatgagcatagattgtctgtacaccaacaccactcacctcgaggtgaactcccgtgttgatgtggtaaagccaggaaacacattggagattccaataactttttatcctcgagaaagtatcaactatcaagaactcattccctttgaaatcaatgggctctcacaacaaacagtcgaaatcaaagggaagggtaccaaaatgaagattttagtcctagatccagccaacaggattgtgaagttgggagctgtcctaccagggcaggttgtgaaaagaacagtttccatcatgaacaacagcctggcccagctcacatttaatcagtccattctgttcacaattccagaactccaggaacccaaggtccttaccctggcgcccttccacaacatcacactgaagcccaaagaagtctgtaaactggaagtcatctttgccccgaagaagcgtgtccctcccttctctgaggaagtgttcatggaatgcatggggctcctgcgccccctcttcctccttagcggctgctgccaggccctggagatctcactggaccaggaacatattccctttggacccgtggtgtatcagacgcaagccacacgtcgcatcctcatgatgaacacaggcgatgtgggtgcaaggtttaaatgggacatcaaaaaatttgagcctcatttctccattagcccagaagaaggctatattacctcaggcatggaggtttcttttgaagtgacctaccatcccaccgaggtgggaaaggagagcctttgtaaaaacattctctgctacatccagggaggcagtcctctgagtctaaccctgtctggagtctgcgtgggaccacctgcggtaaaagaggtagtgaatttcacgtgccaggtgcgctccaagcacacgcagaccatcctgctgtcaaaccgcaccaaccagacctggaatctgcaccccatctttgagggcgagcactgggaggggcctgagttcatcaccctggaggcccaccagcaaaacaagccctatgagatcacctacaggccccgcaccatgaacttggagaaccgcaagcaccagggcaccctcttcttccccctcccagatgggaccggctggctgtatgctctgcatgggacttctgagctccccaaagctgtagccaatatctatcgtgaagtgccatgtaagaccccctacactgagcttctgccaatcaccaactggctgaacaagccccagagattccgggtcatcgtggaaatactgaaaccagagaagccggacctaagcatcactatgaagggccttgattacattgatgtactgtctggctctaagaaagactacaagctgaacttcttttcccacaaggagggaacgtacgctgcaaaggtgatcttccgaaacgaggtgacaaatgagttcttgtactacaatgtgagtttcagggtcatcccttcaggcatcatcaaaaccatcgagatggtgaccccagtccggcaagttgcgtcagcctccatcaagttggagaaccctctgccctactcggtgaccttctccacggaatgccggatgcccgacatcgccctgccctcccagtttgtggtgcctgccaactccgagggcacgttctcatttgaatttcagcccctgaaagctggagaaaccttcggaagactaactttgcacaacactgacttgggttactaccaatatgagctctatctgaaagccacgccagcacttccggaaaagcctgttcacttccagactgtccttggcagcagccaaatcatccttgtgaagttcatcaattacacacggcagaggacagaatactactgcaggaccgactgtacagacttccacgcagaaaaactcattaatgcagccccaggaggccagggaggcactgaagccagtgtggaagtcttattcgagcccagccacctgggtgagaccaagggcatcctgatcctatcatcgctcgcaggtggagagtatatcatccccctctttggaatggctctgcctcccaagccccaaggtcccttctcgatccgagccgggtacagcataatcatccccttcaagaatgtcttctatcacatggtgaccttctccatcatcgtggataacccagccttcaccattcgcgctggagagtctgtgcggcccaagaagatcaacaacatcacagtctcctttgaaggaaacccatctggcagcaaaacccccatcaccaccaagctgactgtgagctgccctcctggtgaagggagtgagactggagttaaatgggtttattatctgaaggggatcaccctttagtggtaaccagggttacctgtatcaaccaaaagctatgcattgtcttagcctgaaaaagaatagagaaaacaataagaattctaaaggaactgtttttattcttctcatacaattatagggcagttatttccctattatgtgttttccaaatatagatatgaaatatctattccatattaaacattataactacacacaa

What is claimed:

1. An isolated polynucleotide comprising the nucleic acid sequence selected from the group consisting of:
(a) the polynucleotide sequence of SEQ ID NO: 1,
(b) the polynucleotide sequence of SEQ ID NO: 3.
(c) the polynucleotide sequence of SEQ ID NO: 14;
(d) the polynucleotide sequence of SEQ ID NO: 16;
(e) a polynucleotide that hybridizes under the following stringent conditions to the complement of any one of (a)-(e);
(1) hybridization at 65° C. in a hybridization buffer comprising 0.5 M NaHPO₄, and
(2) washing at 65° C. in a wash solution comprising 1×SSC.

2. An isolated polypeptide encoded by the polynucleotide of claim 1.

3. An isolated polypeptide of claim 2, wherein the polypeptide comprises the amino acid sequence of SEQ ID NO: 2.

4. An isolated polypeptide of claim 2, wherein the polypeptide comprises the amino acid sequence of SEQ ID NO: 15.

5. An antibody that specifically bind a polypeptide of claim 2.

6. A composition comprising the polynucleotide of claim 1 and a carrier.

7. A composition comprising the polypeptide of claim 2 and a carrier.

8. A method of detecting the Hydin gene comprising steps of:
(a) contacting a biological sample with a compound that binds to the polynucleotide of claim 1; and
(b) detecting binding between the compound and the polynucleotide,
wherein binding indicates the presence of the Hydin gene in the sample.

9. A method of detecting the Hydin polypeptide comprising steps of,
(a) contacting a biological sample with a compound that binds to the polypeptide encoded by the polynucleotide of claim 1; and
(b) detecting binding between the compound and the polypeptide,
wherein binding indicates the presence of the Hydin polypeptide in the sample.

10. The method of claim 9, wherein the compound that binds the polypeptide is an antibody,

11. A method of detecting a mutation in the human Hydin gene comprising steps of:
(a) contacting a biological sample with a compound that binds to the polynucleotide having the nucleic acid sequence of SEQ ID NO: 14; and
(b) detecting binding between the compound and the polynucleotide, wherein binding indicates the presence of a mutation in the human Hydin gene in the sample.

12. The method of claim 11, wherein the mutation is located at a position that corresponds to the position of the OVE459 mutation within the murine Hydin gene.

13. A method of diagnosing hydrocephalus in a human comprising detecting a mutation in the Hydin gene according to the method of claim 11; wherein the presence of the mutation in the human Hydin gene indicates a probability of the human developing hydrocephalus.

14. The method of claim 13, wherein the mutation is located at a position that corresponds to the position of the OVE459 mutation within the murine Hydin gene.

15. The method of claim 14, wherein the mutation is detected in a prenatal human.

16. A method of diagnosing a cilia dysfunction-related disorder comprising detecting a mutation in the Hydin gene according to the method of claim 11; wherein the presence of the mutation in the Hydin gene indicates a probability of the developing a ciliary dysfunction-related disorder.

17. The method of claim 16, wherein the cilia related disorder is selected from the group consisting of Kartagerner syndrome, primary cilia dyskinesia, chronic sinusitis, male infertility, deafness or kidney failure.
